(19) United States
(12) Patent Application Publication
(10) Pub. No.: US 2024/0325533 A1
(43) Pub. Date: Oct. 3, 2024

(54) MODIFIED IMMUNE CELLS AND METHODS OF USING THE SAME

(71) Applicant: Beam Therapeutics Inc., Cambridge, MA (US)

(72) Inventors: RYAN MURRAY, Cambridge, MA (US); Michail Sitkovsky, Boston, MA (US); Stephen Hatfield, Boston, MA (US)

(73) Assignee: Beam Therapeutics Inc., Cambridge, MA (US)

(21) Appl. No.: 18/737,787

(22) Filed: Jun. 7, 2024

Related U.S. Application Data
(63) Continuation of application No. PCT/US2022/081241, filed on Dec. 9, 2022.
(60) Provisional application No. 63/378,607, filed on Oct. 6, 2022.
(60) Provisional application No. 63/355,036, filed on Jun. 23, 2022.
(60) Provisional application No. 63/288,462, filed on Dec. 10, 2021.

(51) Int. Cl. A61K 39/00; A61P 35/00; C07K 14/725; C07K 16/28; C12N 9/22; C12N 9/78; C12N 15/11; C12N 15/90

(52) U.S. Cl. CPC A61K 39/4634; A61K 39/4611; A61K 39/4643; A61P 35/00; C07K 14/7051; C07K 16/2863; C12N 9/22; C12N 9/78; C12N 15/11; C12N 15/907; C12Y 305/04004; A61K 2239/26; C12N 2310/20

(57) ABSTRACT

The present invention features modified immune cells (e.g., T- or NK-cells) having increased resistance to hypoxia-adenosinergic immunosuppression. Methods for producing and using the same are also provided.

### CROSS REFERENCE TO RELATED APPLICATIONS

[0001] The present application is a U.S. National Stage filed under 35 U.S.C. § 111(a), which is a continuation of and claims priority to International Application No. PCT/US2022/081241, filed Dec. 9, 2022, which claims priority to and benefit of claims priority to U.S. Provisional Applications No. 63/378,607, filed Oct. 6, 2022, 63/355,036, filed Jun. 23, 2022, and 63/288,462, filed Dec. 10, 2021, the entire contents of each of which are hereby incorporated herein by reference in their entirety.

### SEQUENCE LISTING

[0002] This application contains a Sequence Listing which has been submitted electronically in XML format and is hereby incorporated by reference in its entirety. The Sequence Listing XML file, created on Jun. 7, 2024, is named 180802-050005US_SL.xml, and is 1,083,967 bytes in size.

### BACKGROUND OF THE INVENTION

[0003] Autologous and allogeneic immunotherapies are neoplasia treatment approaches in which immune cells expressing chimeric antigen receptors are administered to a subject. To generate an immune cell that expresses a chimeric antigen receptor (CAR), the immune cell is first collected from the subject (autologous) or a donor separate from the subject receiving treatment (allogeneic) and genetically modified to express the chimeric antigen receptor. The resulting cell expresses the chimeric antigen receptor on its cell surface (e.g., CAR T-cell), and upon administration to the subject, the chimeric antigen receptor binds to the marker expressed by the neoplastic cell. This interaction with the neoplasia marker activates the CAR-T cell, which then kills the neoplastic cell. But for autologous or allogeneic cell therapy to be effective and efficient, significant conditions and cellular responses, such as hypoxia-adenosinergic immunosuppression, must be overcome or avoided. Editing genes involved in these processes can enhance CAR-T cell function and resistance to immunosuppression or inhibition, but current methodologies for making such edits have the potential to induce large, genomic rearrangements in the CAR-T cell, thereby negatively impacting its efficacy. Thus, there is a significant need for techniques to more precisely modify immune cells, especially CAR-T cells. This application is directed to this and other important needs.

### SUMMARY OF THE INVENTION

[0004] As described below, the present invention features modified immune cells (e.g., T- or NK-cells) having increased resistance to hypoxia-adenosinergic immunosuppression. Methods for producing and using the same are also provided.

[0005] In one aspect, the invention features a method for producing a modified immune cell containing an alteration in a hypoxic and/or adenosinergic pathway. The method involves contacting the cell with (i) a base editor or a polynucleotide encoding the base editor and (ii) one or more guide polynucleotides or a polynucleotide encoding the guide polynucleotides. The base editor contains a programmable DNA binding domain and a deaminase domain. Each of the guide polynucleotides directs the base editor to effect a nucleobase alteration in a gene encoding a polypeptide component of the hypoxic and/or adenosinergic pathway or a regulatory element thereof, thereby producing a modified immune cell.

[0006] In another aspect, the invention features a method for producing a modified immune cell. The method involves contacting the cell with (i) a base editor or a polynucleotide encoding the base editor and (ii) one or more guide polynucleotides or a polynucleotide encoding the guide polynucleotides. The base editor contains a programmable DNA binding domain and a deaminase domain. Each of the guide polynucleotides directs the base editor to effect a nucleobase alteration in a gene selected from one or more of A2AR, A2BR, HIF1α, and HIF1α.I3, thereby producing a modified immune cell.

[0007] In another aspect, the invention features a method for reducing the expression of a Hypoxia-Inducible Factor 1-alpha (HIF1α) or HIF1α.I3 polypeptide and/or polynucleotide in a cell. The method involves contacting a cell containing a HIF1α or HIF1α.I3 gene with (i) a base editor or a polynucleotide encoding the base editor and (ii) one or more guide polynucleotides or a polynucleotide encoding the guide polynucleotides. The base editor contains a programmable DNA binding domain and a deaminase domain. Each of the guide polynucleotides directs the base editor to effect a nucleobase alteration in a HIF1α, and/or HIF1α.I3 gene that alters a splice acceptor or splice donor site, introduces a stop codon, or otherwise disrupts expression of the gene, thereby reducing expression of a Hypoxia-Inducible Factor 1-alpha (HIF1α) or HIF1α.I3 polypeptide and/or polynucleotide in the cell.

[0008] In another aspect, the invention features a method for reducing the expression of an Adenosine A_{2A} Receptor (A2AR) or A_{2B} Receptor (A2BR) polypeptide and/or polynucleotide in a cell. The method involves contacting a cell containing an A2AR or A2BR gene with (i) a base editor or a polynucleotide encoding the base editor and (ii) one or more guide polynucleotides or a polynucleotide encoding the guide polynucleotides. The base editor contains a programmable DNA binding domain and a deaminase domain. Each of the guide polynucleotides directs the base editor to effect a nucleobase alteration in a A2AR or A2BR gene that alters a splice acceptor or splice donor site, introduces a stop codon, or otherwise disrupts expression of the gene, thereby reducing expression of an A2AR or A2BR polypeptide and/or polynucleotide in the cell.

[0009] In another aspect, the invention features a base editor system that contains (i) a base editor, or a polynucleotide encoding the same and (ii) a guide polynucleotide or a polynucleotide encoding the guide polynucleotide. The base editor contains a programmable DNA binding domain and a deaminase domain. The guide polynucleotide contains a sequence selected from one or more of: UCACCGGAGCGGGAUGCGGA (SEQ ID NO: 387); CUGCUCACCGGAGCGGGAUG (SEQ ID NO: 388); CACUCCCAGGGCUGCGGGGA (SEQ ID NO: 389); CCACUCCCAGGGCUGCGGGG (SEQ ID NO: 390); GCGACGACAGCUGAAGCAGA (SEQ ID NO: 391); UGGAGAGCCAGCCUCUGCCG (SEQ ID NO: 392); GGAGAGCCAGCCUCUGCCGG (SEQ ID NO: 393); ACAUGAGCCAGAGAGGGGCG (SEQ ID NO: 394); GAGGCAGCAAGAACCUUUCA (SEQ ID NO: 395); UGGCCCACACUCCUGGCGGG (SEQ ID NO: 396); CGUUGGCCCACACUCCUGGC (SEQ ID NO: 397); UCUCCCCAGGUACAAUGGCU (SEQ ID NO: 398); CAGUUGUUCCAACCUAGCAU (SEQ ID NO: 399); GGCCAUGCUGCUGGAGACAC (SEQ ID NO: 400); UCACCUGAGCGGGACACAGA (SEQ ID NO: 401); UUACUGUUCCACCCCAGGAA (SEQ ID NO: 402); UUUAAACAGGUAUAAAAGUU (SEQ ID NO: 403); GCUUCAGCGCACUGAGCUGA (SEQ ID NO: 404); UGCCAAGCAGAUGUCAAGAG (SEQ ID NO: 405); CUUACUAUCAUGAUGAGUUU (SEQ ID NO: 406); CAUAUACCUGAGUAGAAAAU (SEQ ID NO: 407); UCAUAUACCUGAGUAGAAAA (SEQ ID NO: 408); UGUUUACAGUUUGAACUAAC (SEQ ID NO: 409); UCAUUAGGCCUUGUGAAAAA (SEQ ID NO: 410); ACACAGGUAUUGCACUGCAC (SEQ ID NO: 411); UAACAGAAUUACCGAAUUGA (SEQ ID NO: 412); AACAGAAUUACCGAAUUGAU (SEQ ID NO: 413); UUUCAGAACUACAGUUCCUG (SEQ ID NO: 414); AGCUCCCAAUGUCGGAGUUU (SEQ ID NO: 415); GAGCUCCCAAUGUCGGAGUU (SEQ ID NO: 416); UUAAAUGAGCUCCCAAUGUC (SEQ ID NO: 417); UUUAAAUGAGCUCCCAAUGU (SEQ ID NO: 418); and ACCAUACCCAUUUUCUAUUC (SEQ ID NO: 419).

[0010] In one aspect, the invention features a cell containing the base editor system of any of the above aspects.

[0011] In another aspect, the invention features a pharmaceutical composition containing an effective amount a modified immune cell of any of the above aspects. In an embodiment, the pharmaceutical composition further contains a pharmaceutically acceptable excipient.

[0012] In another aspect, the invention features a composition containing a guide polynucleotide and a polynucleotide encoding a fusion protein containing a polynucleotide programmable DNA binding domain and a deaminase domain. The guide polynucleotide contains a nucleic acid sequence that is complementary to a gene selected from one or more of A2AR, A2BR, HIF1α, and HIF1α.I3 genes.

[0013] In another aspect, the invention features a kit containing a modified immune cell of any of the above aspects. In an embodiment, the kit further contains written instructions for using the modified immune cell or the pharmaceutical composition of any of the above aspects.

[0014] In another aspect, the invention features a modified immune effector cell. The modified immune effector cell expresses a chimeric antigen receptor targeting an antigen associated with a disease or disorder. The modified immune effector cell contains reduced or undetectable expression of the following polypeptides: A2AR, CD3ε, B2M, and CIITA.

[0015] In another aspect, the invention features a method of treating cancer in a subject, the method involves administering to the subject an effective amount of a modified immune cell of any of the above aspects. In an embodiment, the cancer is a solid tumor.

[0016] In one aspect, the invention features a modified immune cell produced according to the method of any one of the above aspects.

[0017] In one aspect, the invention features a modified immune cell containing a nucleobase alteration that reduces or eliminates expression of a polypeptide selected from one or more of A2AR, A2BR, HIF1α, and HIF1α.I3.

[0018] In one aspect, the invention features a modified immune effector cell. The modified immune effector cell expresses a chimeric antigen receptor targeting an antigen associated with a disease or disorder. The modified immune effector cell comprises reduced or undetectable expression of the following polypeptides: A2AR, B2M, CD3ε, CIITA, PD1, and TGFbR2.

[0019] In any of the above aspects, or embodiments thereof, the nuclease-active nucleic acid programmable DNA binding domain is a Cas12b.

[0020] In any of the above aspects, or embodiments thereof, the polypeptide component of the hypoxic and/or adenosinergic pathway is selected from one or more of A2AR, A2BR, HIF1α, and HIF1α.I3.

[0021] In any of the above aspects, or embodiments thereof, the method increases resistance to hypoxic-adenosinergic immunosuppression of the modified immune cell. In any of the above aspects, or embodiments thereof, the method increases cytokine production of the modified immune cell relative to an unmodified reference immune cell.

[0022] In any of the above aspects, or embodiments thereof, the one or more guide polynucleotides target a site selected from those listed in Table 1A and/or contains a spacer listed in Table 1A or Table 1B.

[0023] In any of the above aspects, or embodiments thereof, the deaminase is an adenosine deaminase or a cytidine deaminase. In any of the above aspects, or embodiments thereof, the deaminase domain is an adenosine deaminase domain, and guides 158, 170, and 173 are used to edit an HIF1α target site.

[0024] In any of the above aspects, or embodiments thereof, the method reduces or virtually eliminates HIF1α expression. In any of the above aspects, or embodiments thereof, the method increases cytokine production in the cell relative to an unmodified reference immune cell.

[0025] In any of the above aspects, or embodiments thereof, the deaminase domain is a cytidine deaminase domain editor, and guides 145 and 155 are used to are used to edit an A2AR target site. In any of the above aspects, or embodiments thereof, the method reduces or virtually eliminates A2AR expression.

[0026] In any of the above aspects, or embodiments thereof, the method reduces adenosine signaling, results in lack of upregulation of pCREB in the presence of 2-chloroadenosine, and or protects the cell from adenosine-mediated cytokine production.

[0027] In any of the above aspects, or embodiments thereof, the deaminase domain is a cytidine deaminase domain, and guides 222, 223, 225, and 226 are used to edit a A2BR target site. In any of the above aspects, or embodiments thereof, the deaminase domain is an adenosine deaminase domain, and guides 221 and 224 are used to edit an A2BR target site. In any of the above aspects, or embodiments thereof, the deaminase domain is an adenosine deaminase domain and guide 155 is used to edit an A2BR target site.

[0028] In any of the above aspects, or embodiments thereof, the cell is a T cell or NK cell. In any of the above aspects, or embodiments thereof, the cell is a chimeric antigen receptor T (CAR-T) cell.

[0029] In any of the above aspects, or embodiments thereof, the method results in a reduction in hypoxia/adenosine-mediated suppression of cytotoxic T cell function. In any of the above aspects, or embodiments thereof, the reduction is a 10% or greater reduction. In any of the above aspects, or embodiments thereof, the reduction is a 25% or greater reduction.

[0030] In any of the above aspects, or embodiments thereof, the base editor contains a complex containing the deaminase domain, the polynucleotide programmable DNA, and the guide polynucleotide, or the base editor is a fusion protein containing the polynucleotide programmable DNA binding polypeptide fused to the deaminase domain.

[0031] In any of the above aspects, or embodiments thereof, the programmable DNA binding domain is Cas9 or Cas12. In any of the above aspects, or embodiments thereof, the programmable DNA binding domain is a Staphylococcus aureus Cas9 (SaCas9), Streptococcus thermophilus 1 Cas9 (St1Cas9), a Streptococcus pyogenes Cas9 (SpCas9), or variants thereof. In any of the above aspects, or embodiments thereof, the programmable DNA binding domain contains a nuclease dead Cas9 (dCas9), a Cas9 nickase (nCas9), or a nuclease active Cas9.

[0032] In any of the above aspects, or embodiments thereof, the base editor further contains one or more uracil glycosylase inhibitors (UGIs). In any of the above aspects, or embodiments thereof, the base editor further contains one or more nuclear localization signals (NLS). In embodiments, the NLS is a bipartite NLS.

[0033] In any of the above aspects, or embodiments thereof, the cell is obtained from a healthy subject.

[0034] In any of the above aspects, or embodiments thereof, the guide polynucleotide directs the base editor to effect a nucleobase alteration that results in a premature stop codon in the gene.

[0035] In any of the above aspects, or embodiments thereof, the nucleobase alteration is an A-to-G or C-to-T alteration. In any of the above aspects, or embodiments thereof, the nucleobase alteration is at a splice acceptor site of the gene. In embodiments, the splice acceptor site is a splice acceptor site 5′ of an exon of the gene.

[0036] In any of the above aspects, or embodiments thereof, the nucleobase alteration results in less than 15% indels in a genome of the cell. In any of the above aspects, or embodiments thereof, the nucleobase alteration results in less than 5% indels in a genome of the cell. In any of the above aspects, or embodiments thereof, the nucleobase alteration results in less than 2% indels in a genome of the cell.

[0037] In any of the above aspects, or embodiments thereof, the cell is a mammalian cell or a human cell.

[0038] In any of the above aspects, or embodiments thereof, the deaminase domain contains an adenosine deaminase domain. In any of the above aspects, or embodiments thereof, the adenosine deaminase domain is TadA7.10, a Tad8, or a Tad9. In any of the above aspects, or embodiments thereof, the adenosine deaminase domain contains a TadA deaminase domain. In any of the above aspects, or embodiments thereof, the adenosine deaminase domain is a TadA containing a V28S mutation or a T166R mutation as numbered in the amino acid sequence MSEVEFSHEYWMRHALTLAKRARDEREVPVGAVLVLNNRVIGEGWNRAIGLHDPTAHAEIMALR QGGLVMQNYRLIDATLYVTFEPCVMCAGAMIHSRIGRVVFGVRNAKTGAAGSLMDVLHYPGMNH RVEITEGILADECAALLCYFFRMPRQVFNAQKKAQSSTD (SEQ ID NO: 1) or a corresponding mutation thereof. In any of the above aspects, or embodiments thereof, the adenosine deaminase domain contains one or more of the following mutations: Y147T, Y147R, Q154S, Y123H, and Q154R as numbered in the amino acid sequence MSEVEFSHEYWMRHALTLAKRARDEREVPVGAVLVLNNRVIGEGWNRAIGLHDPTAHAEIMALR QGGLVMQNYRLIDATLYVTFEPCVMCAGAMIHSRIGRVVFGVRNAKTGAAGSLMDVLHYPGMNH RVEITEGILADECAALLCYFFRMPRQVFNAQKKAQSSTD (SEQ ID NO: 1) or a corresponding mutation thereof. In any of the above aspects, or embodiments thereof, the adenosine deaminase domain contains a combination of mutations selected from one or more of: Y147T Q154R; Y147T+Q154S; Y147R+Q154S; V82S+Q154S; V82S+Y147R; V82S+Q154R; V82S+Y123H; I76Y+V82S; V82S+Y123H+Y147T; V82S+Y123H+Y147R; V82S+Y123H+Q154R; Y147R+Q154R+Y123H; Y147R+Q154R+176Y; Y147R+Q154R+T166R; Y123H+Y147R+Q154R+I76Y; V82S+Y123H+Y147R+Q154R; and I76Y+V82S+Y123H+Y147R+Q154R as numbered in SEQ ID NO: 2 or corresponding mutations thereof. In any of the above aspects, or embodiments thereof, the adenosine deaminase domain contains a TadA dimer. In any of the above aspects, or embodiments thereof, the adenosine deaminase domain contains an adenosine deaminase monomer.

[0039] In any of the above aspects, or embodiments thereof, the modified immune cell has increased resistance to hypoxic-adenosinergic immunosuppression and/or increased cytokine production relative to an unmodified reference immune cell. In any of the above aspects, or embodiments thereof, the modified immune cell is a T cell or an NK cell. In any of the above aspects, or embodiments thereof, the modified immune cell expresses a chimeric antigen receptor (CAR). In any of the above aspects, or embodiments thereof, the immune cell is obtained from a healthy subject.

[0040] In any of the above aspects, or embodiments thereof, the subject is a human subject.

[0041] In any of the above aspects, or embodiments thereof, the cell contains or further contains a combination of alterations to polypeptides, where the combination of polypeptides is selected from one or more of: a) β2M, TAP1, TAP2, and Tapasin; b) TRAC, CD52, CIITA, HLA-E, HLA-G, PD-L1, PD1, and CD47; c) TRAC, CD52, and CIITA; d) HLA-E, HLA-G, PD-L1, PD1, and CD47; e) one or more of 02M, TAP1, TAP2, and Tapasin, and one or more of HLA-E, HLA-G, PD-L1, PD1, and CD47; f) B2M, CD3ε, and CIITA; g) A2AR, B2M, CD3ε, and CIITA; and h) A2AR, B2M, CD3ε, CIITA, PD1, and TGFbR2.

[0042] In any of the above aspects, or embodiments thereof, the cell is a mammalian cell, a human cell, or a motor neuron. In any of the above aspects, or embodiments thereof, the cell is in vivo, ex vivo, or in vitro. In any of the above aspects, or embodiments thereof, the cell is an autologous cell isolated from a subject. In any of the above aspects, or embodiments thereof, the cell is an allogeneic cell.

[0043] In any of the above aspects, or embodiments thereof, the guide polynucleotide targets a site selected from those listed in Table 1A and/or contains a spacer listed in Table 1A or 1B.

[0044] In any of the above aspects, or embodiments thereof, deaminase domain is a cytidine and/or adenosine deaminase domain.

[0045] In any of the above aspects, or embodiments thereof, the polynucleotide encoding the fusion protein contains mRNA.

[0046] In any of the above aspects, or embodiments thereof, the method further involves altering the cell to reduce or eliminate expression of one or more polypeptides selected from one or more of B2M, CD3ε, PD1, CIITA, CTLA4, LAG3, TIM3, TGFbR1, and TGFbR2. In any of the above aspects, or embodiments thereof, the method further involves altering the cell to reduce or eliminate expression of each of HLA Class I polypeptides, HLA Class II polypeptides, and A2AR. In any of the above aspects, or embodiments thereof, the method further involves altering the cell to reduce or eliminate expression of the following polypeptides: CD3ε, B2M, and CIITA. In any of the above aspects, or embodiments thereof, the method further involves altering the cell to reduce or eliminate expression of the following polypeptides: A2AR and HIF1α. In any of the above aspects, or embodiments thereof, the method further involves altering the cell to reduce or eliminate expression of one or more polypeptides selected from one or more of CD3ε, CD3δ, CD3γ, B2M, CIITA, TRAC, and TRBC. In any of the above aspects, or embodiments thereof, the method further involves over-expressing Human Leukocyte Antigen-E (HLA-E) or Human Leukocyte Antigen-G (HLA-G) in the cell.

[0047] In any of the aspects provided herein, or embodiments thereof, the disease or disorder is a neoplasia.

[0048] In any of the above aspects, or embodiments thereof, the guide polynucleotide comprises a scaffold comprising the nucleotide sequence GUUUUAGAGCUAGAAAUAGCAAGUUAAAAUAAGGCUAGUCCGUUAUCAACUUGA AAAAGUGGCACCGAGUCGGUGCUUUU (Cas9 scaffold; SEQ ID NO: 317).

[0049] In any of the above aspects, or embodiments thereof, the method involves reducing the expression of the A2AR polypeptide and/or polynucleotide in the cell.

[0050] In any of the above aspects, or embodiments thereof, the neoplasia is a solid tumor.

[0051] In any of the above aspects, or embodiments thereof, the method involves, or further involves, contacting the cell with one or more guide polynucleotides, or one or more polynucleotides encoding the same, containing a sequence selected from one or more of the following: TSBTx2043 (targeting an A2AR polynucleotide), TSBTx4073 (targeting a CD3ε polynucleotide), TSBTx760 (targetinga B2M polynucleotide), TSBTx763 (targeting a CIITA polynucleotide), and TSBTx025 (targeting a PD1 polynucleotide) (see sequences provided in Tables 1A and 1B). In any of the above aspects, or embodiments thereof, the method involves, or further involves, contacting the cell with one, two, three, four, or five guide polynucleotides, or one or more polynucleotides encoding the same, where the guide polynucleotides are selected from: TSBTx2043, TSBTx4073, TSBTx760, TSBTx763, and TSBTx025. In any of the above aspects, or embodiments thereof, the method involves, or further involves, contacting the cell with one, two, three, or four guide polynucleotides, or one or more polynucleotides encoding the same, where the guide polynucleotides are selected from: TSBTx2043, TSBTx4073, TSBTx763, and TSBTx025. In any of the above aspects, or embodiments thereof, the base editor is ABE8.20.

### Definitions

[0052] By “anti-Epidermal Growth Factor Receptor chimeric antigen receptor (anti-EGFR CAR) polypeptide” is meant a CAR that specifically binds an EGFR, wherein such binding activates the CAR-T cell, and having at least about 85% amino acid sequence identity to the following sequence:

(SEQ ID NO: 454)
MALPVTALLLPLALLLHAARPQILLTQSPVILSVSPGERVSFSCRASQSIGTNIHWYQQRTN
GSPRLLIKYASESISGIPSRFSGSGSGTDFTLSINSVESEDIADYYCOONNNWPTTFGAGTKLEL
KGGGGSGGGGSGGGGSQVOLKQSGPGLVQPSQSLSITCTVSGFSLTNYGVHWVROSPG
KGLEWLGVIWSGGNTDYNTPFTSRLSINKDNSKSQVFFKMNSLQSQDTAIYYCARALTY
YDYEFAYWGQGTLVTVSSTTTPAPRPPTPAPTIASQPLSLRPEACRPAAGGAVHTRGL
DFACDIYIWAPLAGTCGVLLLSLVITLYCKRGRKKLLYIFKQPEMRPVQTTQEEDGCSCR

[chemical structure]

[chemical structure]

[chemical structure]

[0053] In the above sequence, bold text indicates a signal peptide, italic text indicates a cetuximab VL domain, underlined text indicates a G4S linker, bold italic text indicates a cetuximab VH domain, bold underlined text indicates a CD8a hinge domain, plain text indicates a CD8a transmembrane domain, bold, italic, underlined text indicates a tail CD8 domain, double underlined text indicates a 4-1BB intracellular signaling/costimulatory domain, and text [symbol] indicates a CD3zeta intracellular signaling domain.

[0054] By “anti-EGFR chimeric antigen receptor (anti-EGFR CAR) polynucleotide” is meant a nucleic acid molecule encoding an anti-EGFR CAR polypeptide, as well as the introns, exons, and regulatory sequences associated with its expression, or fragments thereof. In embodiments, an anti-EGFR CAR polynucleotide is the genomic sequence, mRNA, or gene associated with and/or required for anti-EGFR CAR expression. Exemplary anti-EGFR CAR nucleotide sequences are provided below.
[0055] >EGFR coding sequence

(SEQ ID NO: 455)
ATGGCACTGCCAGTGACAGCTCTCCTGTTGCCACTCGCCCTTCTGCTGCA
TGCTGCAAGGCCTCAAATCCTGCTCACTCAGAGCCCGGTGATTTTGTCCG
TCTCCCCCGGCGAGCGCGTATCATTTTCATGTAGGGCTTCTCAGAGCATC
GGCACCAATATTCACTGGTATCAGCAGCGCACAAATGGCAGCCCAAGACT
GCTCATTAAGTATGCCTCAGAATCAATTTCAGGCATCCCAAGCCGCTTCT
CCGGCTCAGGCTCCGGGACCGACTTTACATTGAGCATTAACTCAGTGGAA
TCTGAAGACATCGCCGATTACTACTGTCAACAGAATAATAACTGGCCGAC
GACGTTTGGCGCCGGAACTAAACTGGAACTGAAGGGGGGAGGGGGCTCTG
GAGGTGGAGGGTCCGGAGGAGGCGGGTCACAAGTGCAGCTGAAGCAATCT
GGACCTGGACTCGTTCAGCCTTCTCAGAGCCTCTCCATCACTTGCACTGT
AAGTGGCTTCTCACTGACCAACTATGGGGTGCACTGGGTGAGACAGTCCC
CCGGAAAGGGGCTGGAATGGCTCGGAGTTATTTGGAGCGGAGGAAATACG
GACTACAACACCCCGTTTACATCCAGACTCTCCATAAATAAGGATAACAG
CAAAAGCCAGGTGTTTTTTAAAATGAACAGCCTGCAGAGCCAAGATACAG
CTATCTATTATTGTGCGCGCGCACTGACATACTATGACTACGAGTTTGCA
TACTGGGGCCAAGGGACCCTTGTCACAGTCTCATCAACCACAACACCTGC
TCCAAGGCCCCCCACACCCGCTCCAACTATAGCCAGCCAACCATTGAGCC
TCAGACCTGAAGCTTGCAGGCCCGCAGCAGGAGGCGCCGTCCATACGCGA
GGCCTGGACTTCGCGTGTGATATTTATATTTGGGCCCCTTTGGCCGGAAC
ATGTGGGGTGTTGCTTCTCTCCCTTGTGATCACTCTGTATTGTAAGCGCG
GGAGAAAGAAGCTCCTGTACATCTTCAAGCAGCCTTTTATGCGACCTGTG
CAAACCACTCAGGAAGAAGATGGGTGTTCATGCCGCTTCCCCGAGGAGGA
AGAAGGAGGGTGTGAACTGAGGGTGAAATTTTCTAGAAGCGCCGATGCTC
CCGCATATCAGCAGGGTCAGAATCAGCTCTACAATGAATTGAATCTCGGC
AGGCGAGAAGAGTACGATGTTCTGGACAAGAGACGGGGCAGGGATCCCGA
GATGGGGGGAAAGCCCCGGAGAAAAAATCCTCAGGAGGGGTTGTACAATG
AGCTGCAGAAGGACAAGATGGCTGAAGCCTATAGCGAGATCGGAATGAAA
GGCGAAAGACGCAGAGGCAAGGGGCATGACGGTCTGTACCAGGGTCTCTC
TACAGCCACCAAGGACACTTATGATGCGTTGCATATGCAAGCCTTGCCAC
CCCGCTAA.

[0056] >pBB1245EGFR(NoAAA).CD8.TM.41BB.CD3Z plasmid sequence

TCGCGCGTTTCGGTGATGACGGTGAAAACCTCTGACACATGCAGCTCCCGGAGACGGTCACAGC
TTGTCTGTAAGCGGATGCCGGGAGCAGACAAGCCCGTCAGGGCGCGTCAGCGGGTGTTGGCGGG
TGTCGGGGCTGGCTTAACTATGCGGCATCAGAGCAGATTGTACTGAGAGTGCACCATCATATGC
CAGCCTATGGTGACATTGATTATTGACTAGTTATTAATAGTAATCAATTACGGGGTCATTAGTT
CATAGCCCATATATGGAGTTCCGCGTTACATAACTTACGGTAAATGGCCCGCCTGGCTGACCGC
CCAACGACCCCCGCCCATTGACGTCAATAATGACGTATGTTCCCATAGTAACGCCAATAGGGAC
TTTCCATTGACGTCAATGGGTGGAGTATTTACGGTAAACTGCCCACTTGGCAGTACATCAAGTG
TATCATATGCCAAGTACGCCCCCTATTGACGTCAATGACGGTAAATGGCCCGCCTGGCATTATG
CCCAGTACATGACCTTATGGGACTTTCCTACTTGGCAGTACATCTACGTATTAGTCATCGCTAT
TACCATGGTGATGCGGTTTTGGCAGTACATCAATGGGCGTGGATAGCGGTTTGACTCACGGGGA
TTTCCAAGTCTCCACCCCATTGACGTCAATGGGAGTTTGTTTTGGCACCAAAATCAACGGGACT
TTCCAAAATGTCGTAACAACTCCGCCCCATTGACGCAAATGGGCGGTAGGCGTGTACGGTGGGA
GGTCTATATAAGCAGAGCTCGTTTAGTGAACCGGGTCTCTCTGGTTAGACCAGATCTGAGCCTG
GGAGCTCTCTGGCTAACTAGGGAACCCACTGCTTAAGCCTCAATAAAGCTTGCCTTGAGTGCTC
AAAGTAGTGTGTGCCCGTCTGTTGTGTGACTCTGGTAACTAGAGATCCCTCAGACCCTTTTAGT
CAGTGTGGAAAATCTCTAGCAGTGGCGCCCGAACAGGGACTTGAAAGCGAAAGTAAAGCCAGAG
GAGATCTCTCGACGCAGGACTCGGCTTGCTGAAGCGCGCACGGCAAGAGGCGAGGGGCGGCGAC
TGGTGAGTACGCCAAAAATTTTGACTAGCGGAGGCTAGAAGGAGAGAGTAGGGTGCGAGAGCGT
CGGTATTAAGCGGGGGAGAATTAGATAAATGGGAAAAAATTCGGTTAAGGCCAGGGGGAAAGAA
ACAATATAAACTAAAACATATAGTTAGGGCAAGCAGGGAGCTAGAACGATTCGCAGTTAATCCT
GGCCTTTTAGAGACATCAGAAGGCTGTAGACAAATACTGGGACAGCTACAACCATCCCTTCAGA
CAGGATCAGAAGAACTTAGATCATTATATAATACAATAGCAGTCCTCTATTGTGTGCATCAAAG
GATAGATGTAAAAGACACCAAGGAAGCCTTAGATAAGATAGAGGAAGAGCAAAACAAAAGTAAG
AAAAAGGCACAGCAAGCAGCAGCTGACACAGGAAACAACAGCCAGGTCAGCCAAAATTACCCTA
TAGTGCAGAACCTCCAGGGGCAAATGGTACATCAGGCCATATCACCTAGAACTTTAAATTAAGA
CAGCAGTACAAATGGCAGTATTCATCCACAATTTTAAAAGAAAAGGGGGGATTGGGGGGTACAG
TGCAGGGGAAAGAATAGTAGACATAATAGCAACAGACATACAAACTAAAGAATTACAAAAACAA
ATTACAAAAATTCAAAATTTTCGGGTTTATTACAGGGACAGCAGAGATCCAGTTTGGAAAGGAC
CAGCAAAGCTCCTCTGGAAAGGTGAAGGGGCAGTAGTAATACAAGATAATAGTGACATAAAAGT
AGTGCCAAGAAGAAAAGCAAAGATCATCAGGGATTATGGAAAACAGATGGCAGGTGATGATTGT
GTGGCAAGTAGACAGGATGAGGATTAACACATGGAAAAGATTAGTAAAACACCATAGCTCTAGA
GCGATCCCGATCTTCAGACCTGGAGGAGGAGATATGAGGGACAATTGGAGAAGTGAATTATATA
AATATAAAGTAGTAAAAATTGAACCATTAGGAGTAGCACCCACCAAGGCAAAGAGAAGAGTGGT
GCAGAGAGAAAAAAGAGCAGTGGGAATAGGAGCTTTGTTCCTTGGGTTCTTGGGAGCAGCAGGA
AGCACTATGGGCGCAGCGTCAATGACGCTGACGGTACAGGCCAGACAATTATTGTCTGGTATAG
TGCAGCAGCAGAACAATTTGCTGAGGGCTATTGAGGCGCAACAGCATCTGTTGCAACTCACAGT
CTGGGGCATCAAGCAGCTCCAGGCAAGAATCCTGGCTGTGGAAAGATACCTAAAGGATCAACAG
CTCCTGGGGATTTGGGGTTGCTCTGGAAAACTCATTTGCACCACTGCTGTGCCTTGGAATGCTA
GTTGGAGTAATAAATCTCTGGAACAGATTTGGAATCACACGACCTGGATGGAGTGGGACAGAGA
AATTAACAATTACACAAGCTTGGTAGGTTTAAGAATAGTTTTTGCTGTACTTTCTATAGTGAAT
AGAGTTAGGCAGGGATATTCACCATTATCGTTTCAGACCCACCTCCCAACCCCGAGGGGACCCG
ACAGGCCCGAAGGAATAGAAGAAGAAGGTGGAGAGAGAGACAGAGACAGATCCATTCGATTAGT
GAACGGATCCATCTCGACGGAATGAAAGACCCCACCTGTAGGTTTGGCAAGCTAGGATCAAGGT
TAGGAACAGAGAGACAGCAGAATATGGGCCAAACAGGATATCTGTGGTAAGCAGTTCCTGCCCC
GGCTCAGGGCCAAGAACAGTTGGAACAGCAGAATATGGGCCAAACAGGATATCTGTGGTAAGCA
GTTCCTGCCCCGGCTCAGGGCCAAGAACAGATGGTCCCCAGATGCGGTCCCGCCCTCAGCAGTT
TCTAGAGAACCATCAGATGTTTCCAGGGTGCCCCAAGGACCTGAAATGACCCTGTGCCTTATTT
GAACTAACCAATCAGTTCGCTTCTCGCTTCTGTTCGCGCGCTTCTGCTCCCCGAGCTCAATAAA
AGAGCCCACAACCCCTCACTCGGCGCGATTCACCTGACGCGTCTACGCCACCATGGCACTGCCA
GTGACAGCTCTCCTGTTGCCACTCGCCCTTCTGCTGCATGCTGCAAGGCCTCAAATCCTGCTCA
CTCAGAGCCCGGTGATTTTGTCCGTCTCCCCCGGCGAGCGCGTATCATTTTCATGTAGGGCTTC
TCAGAGCATCGGCACCAATATTCACTGGTATCAGCAGCGCACAAATGGCAGCCCAAGACTGCTC
ATTAAGTATGCCTCAGAATCAATTTCAGGCATCCCAAGCCGCTTCTCCGGCTCAGGCTCCGGGA
CCGACTTTACATTGAGCATTAACTCAGTGGAATCTGAAGACATCGCCGATTACTACTGTCAACA
GAATAATAACTGGCCGACGACGTTTGGCGCCGGAACTAAACTGGAACTGAAGGGGGGAGGGGGC
TCTGGAGGTGGAGGGTCCGGAGGAGGCGGGTCACAAGTGCAGCTGAAGCAATCTGGACCTGGAC
TCGTTCAGCCTTCTCAGAGCCTCTCCATCACTTGCACTGTAAGTGGCTTCTCACTGACCAACTA
TGGGGTGCACTGGGTGAGACAGTCCCCCGGAAAGGGGCTGGAATGGCTCGGAGTTATTTGGAGC
GGAGGAAATACGGACTACAACACCCCGTTTACATCCAGACTCTCCATAAATAAGGATAACAGCA
AAAGCCAGGTGTTTTTTAAAATGAACAGCCTGCAGAGCCAAGATACAGCTATCTATTATTGTGC
GCGCGCACTGACATACTATGACTACGAGTTTGCATACTGGGGCCAAGGGACCCTTGTCACAGTC
TCATCAACCACAACACCTGCTCCAAGGCCCCCCACACCCGCTCCAACTATAGCCAGCCAACCAT
TGAGCCTCAGACCTGAAGCTTGCAGGCCCGCAGCAGGAGGCGCCGTCCATACGCGAGGCCTGGA
CTTCGCGTGTGATATTTATATTTGGGCCCCTTTGGCCGGAACATGTGGGGTGTTGCTTCTCTCC
CTTGTGATCACTCTGTATTGTAAGCGCGGGAGAAAGAAGCTCCTGTACATCTTCAAGCAGCCTT
TTATGCGACCTGTGCAAACCACTCAGGAAGAAGATGGGTGTTCATGCCGCTTCCCCGAGGAGGA
AGAAGGAGGGTGTGAACTGAGGGTGAAATTTTCTAGAAGCGCCGATGCTCCCGCATATCAGCAG
GGTCAGAATCAGCTCTACAATGAATTGAATCTCGGCAGGCGAGAAGAGTACGATGTTCTGGACA
AGAGACGGGGCAGGGATCCCGAGATGGGGGGAAAGCCCCGGAGAAAAAATCCTCAGGAGGGGTT
GTACAATGAGCTGCAGAAGGACAAGATGGCTGAAGCCTATAGCGAGATCGGAATGAAAGGCGAA
AGACGCAGAGGCAAGGGGCATGACGGTCTGTACCAGGGTCTCTCTACAGCCACCAAGGACACTT
ATGATGCGTTGCATATGCAAGCCTTGCCACCCCGCTAATGACAGGTACCTTTAAGACCAATGAC
TTACAAGGCAGCTGTAGATCTTAGCCACTTTTTAAAAGAAAAGGGGGGACTGGAAGGGCTAATT
CACTCCCAAAGAAGACAAGATCTGCTTTTTGCCTGTACTGGGTCTCTCTGGTTAGACCAGATCT
GAGCCTGGGAGCTCTCTGGCTAACTAGGGAACCCACTGCTTAAGCCTCAATAAAGCTTGCCTTG
AGTGCTTCAATGTGTGTGTTGGTTTTTTGTGTGTCGAAATTCTAGCGATTCTAGCTTGGCGTAA
TCATGGTCATAGCTGTTTCCTGTGTGAAATTGTTATCCGCTCACAATTCCACACAACATACGAG
CCGGAAGCATAAAGTGTAAAGCCTGGGGTGCCTAATGAGTGAGCTAACTCACATTAATTGCGTT
GCGCTCACTGCCCGCTTTCCAGTCGGGAAACCTGTCGTGCCAGCTGCATTAATGAATCGGCCAA
CGCGCGGGGAGAGGCGGTTTGCGTATTGGGCGCTCTTCCGCTTCCTCGCTCACTGACTCGCTGC
GCTCGGTCGTTCGGCTGCGGCGAGCGGTATCAGCTCACTCAAAGGCGGTAATACGGTTATCCAC
AGAATCAGGGGATAACGCAGGAAAGAACATGTGAGCAAAAGGCCAGCAAAAGGCCAGGAACCGT
AAAAAGGCCGCGTTGCTGGCGTTTTTCCATAGGCTCCGCCCCCCTGACGAGCATCACAAAAATC
GACGCTCAAGTCAGAGGTGGCGAAACCCGACAGGACTATAAAGATACCAGGCGTTTCCCCCTGG
AAGCTCCCTCGTGCGCTCTCCTGTTCCGACCCTGCCGCTTACCGGATACCTGTCCGCCTTTCTC
CCTTCGGGAAGCGTGGCGCTTTCTCATAGCTCACGCTGTAGGTATCTCAGTTCGGTGTAGGTCG
TTCGCTCCAAGCTGGGCTGTGTGCACGAACCCCCCGTTCAGCCCGACCGCTGCGCCTTATCCGG
TAACTATCGTCTTGAGTCCAACCCGGTAAGACACGACTTATCGCCACTGGCAGCAGCCACTGGT
AACAGGATTAGCAGAGCGAGGTATGTAGGCGGTGCTACAGAGTTCTTGAAGTGGTGGCCTAACT
ACGGCTACACTAGAAGAACAGTATTTGGTATCTGCGCTCTGCTGAAGCCAGTTACCTTCGGAAA
AAGAGTTGGTAGCTCTTGATCCGGCAAACAAACCACCGCTGGTAGCGGTGGTTTTTTTGTTTGC
AAGCAGCAGATTACGCGCAGAAAAAAAGGATCTCAAGAAGATCCTTTGATCTTTTCTACGGGGT
CTGACGCTCAGTGGAACGAAAACTCACGTTAAGGGATTTTGGTCATGAGATTATCAAAAAGGAT
CTTCACCTAGATCCTTTTAAATTAAAAATGAAGTTTTAAATCAATCTAAAGTATATATGAGTAA
ACTTGGTCTGACAGTTACCAATGCTTAATCAGTGAGGCACCTATCTCAGCGATCTGTCTATTTC
GTTCATCCATAGTTGCCTGACTCCCCGTCGTGTAGATAACTACGATACGGGAGGGCTTACCATC
TGGCCCCAGTGCTGCAATGATACCGCGAGACCCACGCTCACCGGCTCCAGATTTATCAGCAATA
AACCAGCCAGCCGGAAGGGCCGAGCGCAGAAGTGGTCCTGCAACTTTATCCGCCTCCATCCAGT
CTATTAATTGTTGCCGGGAAGCTAGAGTAAGTAGTTCGCCAGTTAATAGTTTGCGCAACGTTGT
TGCCATTGCTACAGGCATCGTGGTGTCACGCTCGTCGTTTGGTATGGCTTCATTCAGCTCCGGT
TCCCAACGATCAAGGCGAGTTACATGATCCCCCATGTTGTGCAAAAAAGCGGTTAGCTCCTTCG
GTCCTCCGATCGTTGTCAGAAGTAAGTTGGCCGCAGTGTTATCACTCATGGTTATGGCAGCACT
GCATAATTCTCTTACTGTCATGCCATCCGTAAGATGCTTTTCTGTGACTGGTGAGTACTCAACC
AAGTCATTCTGAGAATAGTGTATGCGGCGACCGAGTTGCTCTTGCCCGGCGTCAATACGGGATA
ATACCGCGCCACATAGCAGAACTTTAAAAGTGCTCATCATTGGAAAACGTTCTTCGGGGCGAAA
ACTCTCAAGGATCTTACCGCTGTTGAGATCCAGTTCGATGTAACCCACTCGTGCACCCAACTGA
TCTTCAGCATCTTTTACTTTCACCAGCGTTTCTGGGTGAGCAAAAACAGGAAGGCAAAATGCCG
CAAAAAAGGGAATAAGGGCGACACGGAAATGTTGAATACTCATACTCTTCCTTTTTCAATATTA
TTGAAGCATTTATCAGGGTTATTGTCTCATGAGCGGATACATATTTGAATGTATTTAGAAAAAT
AAACAAATAGGGGTTCCGCGCACATTTCCCCGAAAAGTGCCACCTGGGACTAGCTTTTTGCAAA
AGCCTAGGCCTCCAAAAAAGCCTCCTCACTACTTCTGGAATAGCTCAGAGGCCGAGGCGGCCTC
GGCCTCTGCATAAATAAAAAAAATTAGTCAGCCATGGGGCGGAGAATGGGCGGAACTGGGCGGA
GTTAGGGGCGGGATGGGCGGAGTTAGGGGCGGGACTATGGTTGCTGACTAATTGAGATGAGCTT
GCATGCCGACATTGATTATTGACTAGTCCCTAAGAAACCATTCTTATCATGACATTAACCTATA
AAAATAGGCGTATCACGAGGCCCTTTCGTC.

[0057] By “epidermal growth factor receptor (EGFR) polypeptide” is meant an EGFR protein or fragment thereof, having cell signaling activity and having at least about 85% amino acid sequence identity to GenBank Accession No. AAH94761.1. An exemplary EGFR amino acid sequence from Homo Sapiens is provided below (GenBank Accession No. AAH94761.1):

(SEQ ID NO: 457)
MRPSGTAGAALLALLAALCPASRALEEKKVCQGTSNKLTQLGTFEDHFLS
LQRMFNNCEVVLGNLEITYVQRNYDLSFLKTIQEVAGYVLIALNTVERIP
LENLQIIRGNMYYENSYALAVLSNYDANKTGLKELPMRNLQGQKCDPSCP
NGSCWGAGEENCQKLTKIICAQQCSGRCRGKSPSDCCHNQCAAGCTGPRE
SDCLVCRKFRDEATCKDTCPPLMLYNPTTYQMDVNPEGKYSFGATCVKKC
PRNYVVTDHGSCVRACGADSYEMEEDGVRKCKKCEGPCRKVCNGIGIGEF
KDSLSINATNIKHFKNCTSISGDLHILPVAFRGDSFTHTPPLDPQELDIL
KTVKEITGFLLIQAWPENRTDLHAFENLEIIRGRTKQHGQFSLAVVSLNI
TSLGLRSLKEISDGDVIISGNKNLCYANTINWKKLFGTSGQKTKIISNRG
ENSCKATGQVCHALCSPEGCWGPEPRDCVSCRNVSRGRECVDKCNLLEGE
PREFVENSECIQCHPECLPQAMNITCTGRGPDNCIQCAHYIDGPHCVKTC
PAGVMGENNTLVWKYADAGHVCHLCHPNCTYGCTGPGLEGCPTNGPKIPS
IATGMVGALLLLLVVALGIGLFMRRRHIVRKRTLRRLLQERELVEPLTPS
GEAPNQALLRILKETEFKKIKVLGSGAFGTVYKGLWIPEGEKVKIPVAIK
ELREATSPKANKEILDEAYVMASVDNPHVCRLLGICLTSTVQLITQLMPF
GCLLDYVREHKDNIGSQYLLNWCVQIAKGMNYLEDRRLVHRDLAARNVLV
KTPQHVKITDFGLAKLLGAEEKEYHAEGGKVPIKWMALESILHRIYTHQS
DVWSYGVTVWELMTFGSKPYDGIPASEISSILEKGERLPQPPICTIDVYM
IMVKCWMIDADSRPKFRELIIEFSKMARDPQRYLVIQGDERMHLPSPTDS
NFYRALMDEEDMDDVVDADEYLIPQQGFFSSPSTSRTPLLSSLSATSNNS
TVACIDRNGLQSCPIKEDSFLQRYSSDPTGALTEDSIDDTFLPVPGEWLV
WKQSCSSTSSTHSAAASLQCPSQVLPPASPEGETVADLQTQ.

[0058] By “epidermal growth factor receptor (EGFR) polynucleotide” is meant a nucleic acid molecule encoding an EGFR polypeptide, as well as the introns, exons, and regulatory sequences associated with its expression, or fragments thereof. In embodiments, an EGFR polynucleotide is the genomic sequence, mRNA, or gene associated with and/or required for EGFR expression. An exemplary EGFR nucleotide sequence from Homo Sapiens is provided below (GenBank Accession No. BC094761.1, the protein-coding portion of which is provided below).

(SEQ ID NO: 458)
GTCCGGGCAGCCCCCGGCGCAGCGCGGCCGCAGCAGCCTCCTCCCCCCGCACGGTGTGAGCGCC
CGCCGCGGCCGAGGCGGCCGGAGTCCCGAGCTAGCCCCGGCGGCCGCCGCCGCCCAGACCGGAC
GACAGGCCACCTCGTCGGCGTCCGCCCGAGTCCCCGCCTCGCCGCCAACGCCACAACCACCGCG
CACGGCCCCCTGACTCCGTCCAGTATTGATCGGGAGAGCCGGAGCGAGCTCTTCGGGGAGCAGC
GATGCGACCCTCCGGGACGGCCGGGGCAGCGCTCCTGGCGCTGCTGGCTGCGCTCTGCCCGGCG
AGTCGGGCTCTGGAGGAAAAGAAAGTTTGCCAAGGCACGAGTAACAAGCTCACGCAGTTGGGCA
CTTTTGAAGATCATTTTCTCAGCCTCCAGAGGATGTTCAATAACTGTGAGGTGGTCCTTGGGAA
TTTGGAAATTACCTATGTGCAGAGGAATTATGATCTTTCCTTCTTAAAGACCATCCAGGAGGTG
GCTGGTTATGTCCTCATTGCCCTCAACACAGTGGAGCGAATTCCTTTGGAAAACCTGCAGATCA
TCAGAGGAAATATGTACTACGAAAATTCCTATGCCTTAGCAGTCTTATCTAACTATGATGCAAA
TAAAACCGGACTGAAGGAGCTGCCCATGAGAAATTTACAGGGACAAAAGTGTGATCCAAGCTGT
CCCAATGGGAGCTGCTGGGGTGCAGGAGAGGAGAACTGCCAGAAACTGACCAAAATCATCTGTG
CCCAGCAGTGCTCCGGGCGCTGCCGTGGCAAGTCCCCCAGTGACTGCTGCCACAACCAGTGTGC
TGCAGGCTGCACAGGCCCCCGGGAGAGCGACTGCCTGGTCTGCCGCAAATTCCGAGACGAAGCC
ACGTGCAAGGACACCTGCCCCCCACTCATGCTCTACAACCCCACCACGTACCAGATGGATGTGA
ACCCCGAGGGCAAATACAGCTTTGGTGCCACCTGCGTGAAGAAGTGTCCCCGTAATTATGTGGT
GACAGATCACGGCTCGTGCGTCCGAGCCTGTGGGGCCGACAGCTATGAGATGGAGGAAGACGGC
GTCCGCAAGTGTAAGAAGTGCGAAGGGCCTTGCCGCAAAGTGTGTAACGGAATAGGTATTGGTG
AATTTAAAGACTCACTCTCCATAAATGCTACGAATATTAAACACTTCAAAAACTGCACCTCCAT
CAGTGGCGATCTCCACATCCTGCCGGTGGCATTTAGGGGTGACTCCTTCACACATACTCCTCCT
CTGGATCCACAGGAACTGGATATTCTGAAAACCGTAAAGGAAATCACAGGGTTTTTGCTGATTC
AGGCTTGGCCTGAAAACAGGACGGACCTCCATGCCTTTGAGAACCTAGAAATCATACGCGGCAG
GACCAAGCAACATGGTCAGTTTTCTCTTGCAGTCGTCAGCCTGAACATAACATCCTTGGGATTA
CGCTCCCTCAAGGAGATAAGTGATGGAGATGTGATAATTTCAGGAAACAAAAATTTGTGCTATG
CAAATACAATAAACTGGAAAAAACTGTTTGGGACCTCCGGTCAGAAAACCAAAATTATAAGCAA
CAGAGGTGAAAACAGCTGCAAGGCCACAGGCCAGGTCTGCCATGCCTTGTGCTCCCCCGAGGGC
TGCTGGGGCCCGGAGCCCAGGGACTGCGTCTCTTGCCGGAATGTCAGCCGAGGCAGGGAATGCG
TGGACAAGTGCAACCTTCTGGAGGGTGAGCCAAGGGAGTTTGTGGAGAACTCTGAGTGCATACA
GTGCCACCCAGAGTGCCTGCCTCAGGCCATGAACATCACCTGCACAGGACGGGGACCAGACAAC
TGTATCCAGTGTGCCCACTACATTGACGGCCCCCACTGCGTCAAGACCTGCCCGGCAGGAGTCA
TGGGAGAAAACAACACCCTGGTCTGGAAGTACGCAGACGCCGGCCATGTGTGCCACCTGTGCCA
TCCAAACTGCACCTACGGATGCACTGGGCCAGGTCTTGAAGGCTGTCCAACGAATGGGCCTAAG
ATCCCGTCCATCGCCACTGGGATGGTGGGGGCCCTCCTCTTGCTGCTGGTGGTGGCCCTGGGGA
TCGGCCTCTTCATGCGAAGGCGCCACATCGTTCGGAAGCGCACGCTGCGGAGGCTGCTGCAGGA
GAGGGAGCTTGTGGAGCCTCTTACACCCAGTGGAGAAGCTCCCAACCAAGCTCTCTTGAGGATC
TTGAAGGAAACTGAATTCAAAAAGATCAAAGTGCTGGGCTCCGGTGCGTTCGGCACGGTGTATA
AGGGACTCTGGATCCCAGAAGGTGAGAAAGTTAAAATTCCCGTCGCTATCAAGGAATTAAGAGA
AGCAACATCTCCGAAAGCCAACAAGGAAATCCTCGATGAAGCCTACGTGATGGCCAGCGTGGAC
AACCCCCACGTGTGCCGCCTGCTGGGCATCTGCCTCACCTCCACCGTGCAGCTCATCACGCAGC
TCATGCCCTTCGGCTGCCTCCTGGACTATGTCCGGGAACACAAAGACAATATTGGCTCCCAGTA
CCTGCTCAACTGGTGTGTGCAGATCGCAAAGGGCATGAACTACTTGGAGGACCGTCGCTTGGTG
CACCGCGACCTGGCAGCCAGGAACGTACTGGTGAAAACACCGCAGCATGTCAAGATCACAGATT
TTGGGCTGGCCAAACTGCTGGGTGCGGAAGAGAAAGAATACCATGCAGAAGGAGGCAAAGTGCC
TATCAAGTGGATGGCATTGGAATCAATTTTACACAGAATCTATACCCACCAGAGTGATGTCTGG
AGCTACGGGGTGACCGTTTGGGAGTTGATGACCTTTGGATCCAAGCCATATGACGGAATCCCTG
CCAGCGAGATCTCCTCCATCCTGGAGAAAGGAGAACGCCTCCCTCAGCCACCCATATGTACCAT
CGATGTCTACATGATCATGGTCAAGTGCTGGATGATAGACGCAGATAGTCGCCCAAAGTTCCGT
GAGTTGATCATCGAATTCTCCAAAATGGCCCGAGACCCCCAGCGCTACCTTGTCATTCAGGGGG
ATGAAAGAATGCATTTGCCAAGTCCTACAGACTCCAACTTCTACCGTGCCCTGATGGATGAAGA
AGACATGGACGACGTGGTGGATGCCGACGAGTACCTCATCCCACAGCAGGGCTTCTTCAGCAGC
CCCTCCACGTCACGGACTCCCCTCCTGAGCTCTCTGAGTGCAACCAGCAACAATTCCACCGTGG
CTTGCATTGATAGAAATGGGCTGCAAAGCTGTCCCATCAAGGAAGACAGCTTCTTGCAGCGATA
CAGCTCAGACCCCACAGGCGCCTTGACTGAGGACAGCATAGACGACACCTTCCTCCCAGTGCCT
GGTGAGTGGCTTGTCTGGAAACAGTCCTGCTCCTCAACCTCCTCGACCCACTCAGCAGCAGCCA
GTCTCCAGTGTCCAAGCCAGGTGCTCCCTCCAGCATCTCCAGAGGGGGAAACAGTGGCAGATTT
GCAGACACAGTGAAGGGCGTAAGGAGCAGATAAACACATGACCGAGCCTGCACAAGCTCTTTGT
TGTGTCTGGTTGTTTGCTGTACCTCTGTTGTAAGAATGAATCTGCAAAATTTCTAGCTTATGAA
GCAAATCACGGACATACACATCTGTATGTGTGAGTGTTCATGATGTGTGTACATCTGTGTATGT
GTGTGTGTGTATGTGTGTGTTTGTGACAGATTTGATCCCTGTTCTCTCTGCTGGCTCTATCTTG
ACCTGTGAAACGTATATTTAACTAATTAAATATTAGTTAATATTAATAAATTTTAAGCTTTATC
CAGAAAAAAAAAAAAAAAA.

[0059] Unless defined otherwise, all technical and scientific terms used herein have the meaning commonly understood by a person skilled in the art to which this invention belongs. The following references provide one of skill with a general definition of many of the terms used in this invention: Singleton et al., Dictionary of Microbiology and Molecular Biology (2nd ed. 1994); The Cambridge Dictionary of Science and Technology (Walker ed., 1988); The Glossary of Genetics, 5th Ed., R. Rieger et al. (eds.), Springer Verlag (1991); and Hale & Marham, The Harper Collins Dictionary of Biology (1991). As used herein, the following terms have the meanings ascribed to them below, unless specified otherwise.

[0060] By “adenine” or “9H-Purin-6-amine” is meant a purine nucleobase with the molecular formula C₅H₅N₅, having the structure

[chemical structure]

and corresponding to CAS No. 73-24-5. By “adenosine” or “4-Amino-1-[(2R,3R,4S,5R)-3,4-dihydroxy-5-(hydroxymethyl)oxolan-2-yl]pyrimidin-2(1H)-one” is meant an adenine molecule attached to a ribose sugar via a glycosidic bond, having the structure

[chemical structure]

and corresponding to CAS No. 65-46-3. Its molecular formula is C₁₀H₁₃N₅O₄.

[0061] By “Adenosine A_{2A} Receptor (A2AR) polypeptide” is meant a protein having at least about 85% amino acid sequence identity to NCBI Accession No. NP_000666.2 or a fragment thereof that binds adenosine. An exemplary A2AR polypeptide sequence is provided below.

(SEQ ID NO: 370)

| | |
|---|---|
| 1 | MPIMGSSVYI TVELAIAVLA ILGNVLVCWA VWLNSNLQNV |
| | TNYFVVSLAA ADIAVGVLAI |
| 61 | PFAITISTGF CAACHGCLFI ACFVLVLTQS SIFSLLAIAI |
| | DRYIAIRIPL RYNGLVTGTR |
| 121 | AKGIIAICWV LSFAIGLTPM LGWNNCGQPK EGKNHSQGCG |
| | EGQVACLFED VVPMNYMVYF |
| 181 | NFFACVLVPL LLMLGVYLRI FLAARRQLKQ MESQPLPGER |
| | ARSTLQKEVH AAKSLAIIVG |
| 241 | LFALCWLPLH IINCFTFFCP DCSHAPLWLM YLAIVLSHTN |
| | SVVNPFIYAY RIREFRQTFR |
| 301 | KIIRSHVLRQ QEPFKAAGTS ARVLAAHGSD GEQVSLRING |
| | HPPGVWANGS APHPERRPNG |
| 361 | YALGLVSGGS AQESQGNTGL PDVELLSHEL KGVCPEPPGL |
| | DDPLAQDGAG VS |

[0062] By “Adenosine A_{2A} Receptor (A2AR) polynucleotide” is meant a nucleic acid molecule encoding an A2AR polypeptide, as well as the introns, exons, and regulatory sequences associated with its expression, or fragments thereof. In embodiments, an A2AR polynucleotide is the genomic sequence, mRNA, or gene associated with and/or required for A2AR expression. An exemplary A2AR polynucleotide sequence has about an 85% nucleic acid identity to Genbank Accession No. NM_000675.6, provided below, or a fragment thereof. A further exemplary embodiment of an A2AR polynucleotide sequence has about an 85% nucleic acid identity to the “ADORA2A gene sequence” provided in the Sequence Listing as SEQ ID NO: 371, or a fragment thereof.

(SEQ ID NO. 372)

| | |
|---|---|
| 1 | GAAGCTCTGC CTGGGCCTCA GGGACTGTGA CATGGAGCAG |
| | GAGCCGCCCC CAGCCAAGCT |
| 61 | GCTTTCAGCA CAGCGTGGGC CCCCAGCACC TTGGTGCGGG |
| | GTGCGGCCCC TCGGAGGAGG |
| 121 | GCTGTCAGGT GAAGCCTCGT GTGAGGGGGT GCCTCAGGAA |
| | CCCTGAAGCT GGGCTGAGCC |
| 181 | ATGATGCTGC TGCCAGAACC CCTGCAGAGG GCCTGGTTTC |
| | AGGAGACTCA GAGTCCTCTG |
| 241 | TGAAAAAGCC CTTGGAGAGC GCCCCAGCAG GGCTGCACTT |
| | GGCTCCTGTG AGGAAGGGGC |
| 301 | TCAGGGGTCT GGGCCCCTCC GCCTGGGCCG GGCTGGGAGC |
| | CAGGGGGGCG GCTGGGCTGC |
| 361 | AGCAATGGAC CGTGAGCTGG CCCAGCCCGC GTCCGTGCTG |
| | AGCCTGCCTG TCGTCTGTGG |
| 421 | CCATGCCCAT CATGGGCTCC TCGGTGTACA TCACGGTGGA |
| | GCTGGCCATT GCTGTGCTGG |
| 481 | CCATCCTGGG CAATGTGCTG GTGTGCTGGG CCGTGTGGCT |
| | CAACAGCAAC CTGCAGAACG |
| 541 | TCACCAACTA CTTTGTGGTG TCACTGGCGG CGGCCGACAT |
| | CGCAGTGGGT GTGCTCGCCA |
| 601 | TCCCCTTTGC CATCACCATC AGCACCGGGT TCTGCGCTGC |
| | CTGCCACGGC TGCCTCTTCA |
| 661 | TTGCCTGCTT CGTCCTGGTC CTCACGCAGA GCTCCATCTT |
| | CAGTCTCCTG GCCATCGCCA |
| 721 | TTGACCGCTA CATTGCCATC CGCATCCCGC TCCGGTACAA |
| | TGGCTTGGTG ACCGGCACGA |
| 781 | GGGCTAAGGG CATCATTGCC ATCTGCTGGG TGCTGTCGTT |
| | TGCCATCGGC CTGACTCCCA |
| 841 | TGCTAGGTTG GAACAACTGC GGTCAGCCAA AGGAGGGCAA |
| | GAACCACTCC CAGGGCTGCG |
| 901 | GGGAGGGCCA AGTGGCCTGT CTCTTTGAGG ATGTGGTCCC |
| | CATGAACTAC ATGGTGTACT |
| 961 | TCAACTTCTT TGCCTGTGTG CTGGTGCCCC TGCTGCTCAT |
| | GCTGGGTGTC TATTTGCGGA |
| 1021 | TCTTCCTGGC GGCGCGACGA CAGCTGAAGC AGATGGAGAG |
| | CCAGCCTCTG CCGGGGGAGC |
| 1081 | GGGCACGGTC CACACTGCAG AAGGAGGTCC ATGCTGCCAA |
| | GTCACTGGCC ATCATTGTGG |
| 1141 | GGCTCTTTGC CCTCTGCTGG CTGCCCCTAC ACATCATCAA |
| | CTGCTTCACT TTCTTCTGCC |
| 1201 | CCGACTGCAG CCACGCCCCT CTCTGGCTCA TGTACCTGGC |
| | CATCGTCCTC TCCCACACCA |
| 1261 | ATTCGGTTGT GAATCCCTTC ATCTACGCCT ACCGTATCCG |
| | CGAGTTCCGC CAGACCTTCC |
| 1321 | GCAAGATCAT TCGCAGCCAC GTCCTGAGGC AGCAAGAACC |
| | TTTCAAGGCA GCTGGCACCA |
| 1381 | GTGCCCGGGT CTTGGCAGCT CATGGCAGTG ACGGAGAGCA |
| | GGTCAGCCTC CGTCTCAACG |
| 1441 | GCCACCCGCC AGGAGTGTGG GCCAACGGCA GTGCTCCCCA |
| | CCCTGAGCGG AGGCCCAATG |
| 1501 | GCTATGCCCT GGGGCTGGTG AGTGGAGGGA GTGCCCAAGA |
| | GTCCCAGGGG AACACGGGCC |
| 1561 | TCCCAGACGT GGAGCTCCTT AGCCATGAGC TCAAGGGAGT |
| | GTGCCCAGAG CCCCCTGGCC |
| 1621 | TAGATGACCC CCTGGCCCAG GATGGAGCAG GAGTGTCCTG |
| | ATGATTCATG GAGTTTGCCC |
| 1681 | CTTCCTAAGG GAAGGAGATC TTTATCTTTC TGGTTGGCTT |
| | GACCAGTCAC GTTGGGAGAA |
| 1741 | GAGAGAGAGT GCCAGGAGAC CCTGAGGGCA GCCGGTTCCT |
| | ACTTTGGACT GAGAGAAGGG |
| 1801 | AGCCCCAGGC TGGAGCAGCA TGAGGCCCAG CAAGAAGGGC |
| | TTGGGTTCTG AGGAAGCAGA |
| 1861 | TGTTTCATGC TGTGAGGCCT TGCACCAGGT GGGGGCCACA |
| | GCACCAGCAG CATCTTTGCT |
| 1921 | GGGCAGGGCC CAGCCCTCCA CTGCAGAAGC ATCTGGAAGC |
| | ACCACCTTGT CTCCACAGAG |
| 1981 | CAGCTTGGGC ACAGCAGACT GGCCTGGCCC TGAGACTGGG |
| | GAGTGGCTCC AACAGCCTCC |
| 2041 | TGCCACCCAC ACACCACTCT CCCTAGACTC TCCTAGGGTT |
| | CAGGAGCTGC TGGGCCCAGA |
| 2101 | GGTGACATTT GACTTTTTTC CAGGAAAAAT GTAAGTGTGA |
| | GGAAACCCTT TTTATTTTAT |
| 2161 | TACCTTTCAC TCTCTGGCTG CTGGGTCTGC CGTCGGTCCT |
| | GCTGCTAACC TGGCACCAGA |
| 2221 | GCCTCTGCCC GGGGAGCCTC AGGCAGTCCT CTCCTGCTGT |
| | CACAGCTGCC ATCCACTTCT |
| 2281 | CAGTCCCAGG GCCATCTCTT GGAGTGACAA AGCTGGGATC |
| | AAGGACAGGG AGTTGTAACA |
| 2341 | GAGCAGTGCC AGAGCATGGG CCCAGGTCCC AGGGGAGAGG |
| | TTGGGGCTGG CAGGCCACTG |
| 2401 | GCATGTGCTG AGTAGCGCAG AGCTACCCAG TGAGAGGCCT |
| | TGTCTAACTG CCTTTCCTTC |
| 2461 | TAAAGGGAAT GTTTTTTTCT GAGATAAAAT AAAAACGAGC |
| | CACATCGTGT TTTAAGCTTG |
| 2521 | TCCAAATGA |

[0063] By “Adenosine A_{2B} Receptor (A2BR) polypeptide” is meant a protein having at least about 85% amino acid sequence identity to NCBI Accession No. NP_000667.1 or a fragment thereof that binds adenosine. An exemplary A2BR polypeptide sequence is provided below.

(SEQ ID NO: 373)

| | |
|---|---|
| 1 | MLLETQDALY VALELVIAAL SVAGNVLVCA AVGTANTLQT |
| | PTNYFLVSLA AADVAVGLFA |
| 61 | IPFAITISLG FCTDFYGCLF LACFVLVLTQ SSIFSLLAVA |
| | VDRYLAICVP LRYKSLVTGT |
| 121 | RARGVIAVLW VLAFGIGLTP FLGWNSKDSA TNNCTEPWDG |
| | TTNESCCLVK CLFENVVPMS |
| 181 | YMVYFNFFGC VLPPLLIMLV IYIKIFLVAC RQLQRTELMD |
| | HSRTTLQREI HAAKSLAMIV |
| 241 | GIFALCWLPV HAVNCVTLFQ PAQGKNKPKW AMNMAILLSH |
| | ANSVVNPIVY AYRNRDFRYT |
| 301 | FHKIISRYLL CQADVKSGNG QAGVQPALGV GL |

[0064] By “Adenosine A_{2B} Receptor (A2BR) polynucleotide” is meant a nucleic acid molecule encoding an A2AR polypeptide, as well as the introns, exons, and regulatory sequences associated with its expression, or fragments thereof. In embodiments, an A2BR polynucleotide is the genomic sequence, mRNA, or gene associated with and/or required for A2BR expression. An exemplary A2BR polynucleotide sequence has about an 85% nucleic acid identity to Genbank Accession No. NM_000676.4, provided below, or a fragment thereof. A further exemplary embodiment of an A2BR polynucleotide sequence has about an 85% nucleic acid identity to the “ADORA2B gene sequence” provided in the Sequence Listing as SEQ ID NO: 374, or a fragment thereof.

(SEQ ID NO: 375)

| | |
|---|---|
| 1 | AGAAGCGGCA GGCGGAGGCG CGGTCCGGGC GCTATGGCCA |
| | TGCCCGGCGG GTCTCACGCG |
| 61 | GCTGCCCCTC GCCCGGCGCG CCTTCGGTAG GGGGCGCCCG |
| | GGGCCCAGCT GGCCCGGCCA |
| 121 | TGCTGCTGGA GACACAGGAC GCGCTGTACG TGGCGCTGGA |
| | GCTGGTCATC GCCGCGCTTT |
| 181 | CGGTGGCGGG CAACGTGCTG GTGTGCGCCG CGGTGGGCAC |
| | GGCGAACACT CTGCAGACGC |
| 241 | CCACCAACTA CTTCCTGGTG TCCCTGGCTG CGGCCGACGT |
| | GGCCGTGGGG CTCTTCGCCA |
| 301 | TCCCCTTTGC CATCACCATC AGCCTGGGCT TCTGCACTGA |
| | CTTCTACGGC TGCCTCTTCC |
| 361 | TCGCCTGCTT CGTGCTGGTG CTCACGCAGA GCTCCATCTT |
| | CAGCCTTCTG GCCGTGGCAG |
| 421 | TCGACAGATA CCTGGCCATC TGTGTCCCGC TCAGGTATAA |
| | AAGTTTGGTC ACGGGGACCC |
| 481 | GAGCAAGAGG GGTCATTGCT GTCCTCTGGG TCCTTGCCTT |
| | TGGCATCGGA TTGACTCCAT |
| 541 | TCCTGGGGTG GAACAGTAAA GACAGTGCCA CCAACAACTG |
| | CACAGAACCC TGGGATGGAA |
| 601 | CCACGAATGA AAGCTGCTGC CTTGTGAAGT GTCTCTTTGA |
| | GAATGTGGTC CCCATGAGCT |
| 661 | ACATGGTATA TTTCAATTTC TTTGGGTGTG TTCTGCCCCC |
| | ACTGCTTATA ATGCTGGTGA |
| 721 | TCTACATTAA GATCTTCCTG GTGGCCTGCA GGCAGCTTCA |
| | GCGCACTGAG CTGATGGACC |
| 781 | ACTCGAGGAC CACCCTCCAG CGGGAGATCC ATGCAGCCAA |
| | GTCACTGGCC ATGATTGTGG |
| 841 | GGATTTTTGC CCTGTGCTGG TTACCTGTGC ATGCTGTTAA |
| | CTGTGTCACT CTTTTCCAGC |
| 901 | CAGCTCAGGG TAAAAATAAG CCCAAGTGGG CAATGAATAT |
| | GGCCATTCTT CTGTCACATG |
| 961 | CCAATTCAGT TGTCAATCCC ATTGTCTATG CTTACCGGAA |
| | CCGAGACTTC CGCTACACTT |
| 1021 | TTCACAAAAT TATCTCCAGG TATCTTCTCT GCCAAGCAGA |
| | TGTCAAGAGT GGGAATGGTC |
| 1081 | AGGCTGGGGT ACAGCCTGCT CTCGGTGTGG GCCTATGATC |
| | TAGGCTCTCG CCTCTTCCAG |
| 1141 | GAGAAGATAC AAATCCACAA GAAACAAAGA GGACACGGCT |
| | GGTTTTCATT GTGAAAGATA |
| 1201 | GCTACACCTC ACAAGGAAAT GGACTGCCTC TCTTGAGCAC |
| | TTCCCTGGAG CTACCACGTA |
| 1261 | TCTAGCTAAT ATGTATGTGT CAGTAGTAGG CTCCAAGGAT |
| | TGACAAATAT ATTTATGATC |
| 1321 | TATTCAGCTG CTTTTACTGT GTGGATTATG CCAACAGCTT |
| | GAATGGATTC TAACAGACTC |
| 1381 | TTTTGTTTTT AAAAGTCTGC CTTGTTTATG GTGGAAAATT |
| | ACTGAAACTA TTTTACTGTG |
| 1441 | AAACAGTGTG AACTATTATA ATGCAAATAC TTTTTAACTT |
| | AGAGGCAATG GAAAAATAAA |
| 1501 | AGTTGACTGT ACTAAAAATG TA. |

[0065] By “adenosine deaminase” or “adenine deaminase” is meant a polypeptide or fragment thereof capable of catalyzing the hydrolytic deamination of adenine or adenosine. In some embodiments, the deaminase or deaminase domain is an adenosine deaminase catalyzing the hydrolytic deamination of adenosine to inosine or deoxy adenosine to deoxyinosine. In some embodiments, the adenosine deaminase catalyzes the hydrolytic deamination of adenine or adenosine in deoxyribonucleic acid (DNA). The adenosine deaminases (e.g., engineered adenosine deaminases, evolved adenosine deaminases) provided herein may be from any organism (e.g., eukaryotic, prokaryotic), including but not limited to algae, bacteria, fungi, plants, invertebrates (e.g., insects), and vertebrates (e.g., amphibians, mammals). (e.g., eukaryotic, prokaryotic), including but not limited to algae, bacteria, fungi, plants, invertebrates (e.g., insects), and vertebrates (e.g., amphibians, mammals).

[0066] By “adenosine deaminase activity” is meant catalyzing the deamination of adenine or adenosine to guanine in a polynucleotide. In some embodiments, an adenosine deaminase variant as provided herein maintains adenosine deaminase activity (e.g., at least about 30%, 40%, 50%, 60%, 70%, 80%, 90% or more of the activity of a reference adenosine deaminase (e.g., TadA*8.20 or TadA*8.19)).

[0067] By “Adenosine Base Editor (ABE)” is meant a base editor comprising an adenosine deaminase.

[0068] By “Adenosine Base Editor (ABE) polynucleotide” is meant a polynucleotide that encodes an ABE.

[0069] By “Adenosine Base Editor 8 (ABE8) polypeptide” or “ABE8” is meant a base editor as defined herein comprising one or more of the alterations listed in Table 15, one of the combinations of alterations listed in Table 15, or an alteration at any of the amino acid positions listed in Table 15, such alterations are relative to the following reference sequence: MSEVEFSHEYWMRHALTLAKRARDEREVPVGAVLVLNNRVIGEGWNRAIGLHDPTAHAEIMALR QGGLVMQNYRLIDATLYVTFEPCVMCAGAMIHSRIGRVVFGVRNAKTGAAGSLMDVLHYPGMNH RVEITEGILADECAALLCYFFRMPRQVFNAQKKAQSSTD (SEQ ID NO: 1) or at a corresponding position in another adenosine deaminase. In some embodiments, an ABE8 comprises alterations at amino acids 82 and/or 166 of SEQ ID NO. 1. In some embodiments, ABE8 comprises further alterations, as described herein, relative to the reference sequence.

[0070] By “Adenosine Base Editor 8 (ABE8) polynucleotide” is meant a polynucleotide encoding an ABE8.

[0071] “Administering” is referred to herein as providing one or more compositions described herein to a patient or a subject.

[0072] By “agent” is meant any small molecule chemical compound, antibody, nucleic acid molecule, or polypeptide, or fragments thereof.

[0073] “Allogeneic” as used herein, refers to cells taken from two non-identical individuals of the same species.

[0074] By “alteration” is meant a change (e.g., increase or decrease) in the level, structure, or activity of an analyte, gene or polypeptide as detected by standard art known methods such as those described herein. As used herein, an alteration includes a 10% change in expression levels, a 25% change, a 40% change, and a 50% or greater change in expression levels. In some embodiments, an alteration includes an insertion, deletion, or substitution of a nucleobase or amino acid.

[0075] By “ameliorate” is meant decrease, suppress, attenuate, diminish, arrest, or stabilize the development or progression of a disease.

[0076] By “analog” is meant a molecule that is not identical but has analogous functional or structural features. For example, a polypeptide analog retains the biological activity of a corresponding naturally-occurring polypeptide, while having certain biochemical modifications that enhance the analog's function relative to a naturally occurring polypeptide. Such biochemical modifications could increase the analog's protease resistance, membrane permeability, or half-life, without altering, for example, ligand binding. An analog may include an unnatural amino acid.

[0077] “Autologous,” as used herein, refers to cells obtained from the same individual.

[0078] By “base editor (BE),” or “nucleobase editor polypeptide (NBE)” is meant an agent that binds a polynucleotide and has nucleobase modifying activity. In various embodiments, the base editor comprises a nucleobase modifying polypeptide (e.g., a deaminase) and a polynucleotide programmable nucleotide binding domain (e.g., Cas9 or Cpf1) in conjunction with a guide polynucleotide (e.g., guide RNA (gRNA)). Representative nucleic acid and protein sequences of base editors are provided in the Sequence Listing as SEQ ID NOs: 2-11.

[0079] By “AZD4635” is meant an agent with the structure

[chemical structure]

and corresponding to CAS No. 1321514-06-0, or a pharmaceutically acceptable salt thereof, that inhibits A2AR signaling.

[0080] By “beta-2 microglobulin (02M; B2M) polypeptide” is meant a protein having at least about 85% amino acid sequence identity to UniProt Accession No. P61769, which is provided below, or a fragment thereof having immunomodulatory activity.
[0081] >sp|P61769|B2MG_HUMAN Beta-2-microglobulin OS=Homo sapiens OX=9606 GN=B2M PE=1 SV=1

(SEQ ID NO: 467)
MSRSVALAVLALLSLSGLEAIQRTPKIQVYSRHPAENGKSNFLNCYVSGF
HPSDIEVDLLKNGERIEKVEHSDLSFSKDWSFYLLYYTEFTPTEKDEYAC
RVNHVTLSQPKIVKWDRDM.

[0082] By “beta-2-microglobulin (β2M; B2M) polynucleotide” is meant a nucleic acid molecule encoding an β2M polypeptide, as well as the introns, exons, 3′ untranslated regions, 5′ untranslated regions, and regulatory sequences associated with its expression, or fragments thereof. The beta-2-microglobulin gene encodes a serum protein associated with the major histocompatibility complex. β2M is involved in non-self-recognition by host CD8+ T cells. An exemplary 02M polynucleotide sequence is provided at GenBank Accession No. DQ217933.1, which is provided below.
[0083] >DQ217933.1 Homo sapiens beta-2-microglobin (β2M) gene, complete cds

(SEQ ID NO: 468)
CATGTCATAAATGGTAAGTCCAAGAAAAATACAGGTATTCCCCCCCAAAGAAAACTGTAAAATC
GACTTTTTTCTATCTGTACTGTTTTTTATTGGTTTTTAAATTGGTTTTCCAAGTGAGTAAATCA
GAATCTATCTGTAATGGATTTTAAATTTAGTGTTTCTCTGTGATGTAGTAAACAAGAAACTAGA
GGCAAAAATAGCCCTGTCCCTTGCTAAACTTCTAAGGCACTTTTCTAGTACAACTCAACACTAA
CATTTCAGGCCTTTAGTGCCTTATATGAGTTTTTAAAAGGGGGAAAAGGGAGGGAGCAAGAGTG
TCTTAACTCATACATTTAGGCATAACAATTATTCTCATATTTTAGTTATTGAGAGGGCTGGTAG
AAAAACTAGGTAAATAATATTAATAATTATAGCGCTTATTAAACACTACAGAACACTTACTATG
TACCAGGCATTGTGGGAGGCTCTCTCTTGTGCATTATCTCATTTCATTAGGTCCATGGAGAGTA
TTGCATTTTCTTAGTTTAGGCATGGCCTCCACAATAAAGATTATCAAAAGCCTAAAAATATGTA
AAAGAAACCTAGAAGTTATTTGTTGTGCTCCTTGGGGAAGCTAGGCAAATCCTTTCAACTGAAA
ACCATGGTGACTTCCAAGATCTCTGCCCCTCCCCATCGCCATGGTCCACTTCCTCTTCTCACTG
TTCCTCTTAGAAAAGATCTGTGGACTCCACCACCACGAAATGGCGGCACCTTATTTATGGTCAC
TTTAGAGGGTAGGTTTTCTTAATGGGTCTGCCTGTCATGTTTAACGTCCTTGGCTGGGTCCAAG
GCAGATGCAGTCCAAACTCTCACTAAAATTGCCGAGCCCTTTGTCTTCCAGTGTCTAAAATATT
AATGTCAATGGAATCAGGCCAGAGTTTGAATTCTAGTCTCTTAGCCTTTGTTTCCCCTGTCCAT
AAAATGAATGGGGGTAATTCTTTCCTCCTACAGTTTATTTATATATTCACTAATTCATTCATTC
ATCCATCCATTCGTTCATTCGGTTTACTGAGTACCTACTATGTGCCAGCCCCTGTTCTAGGGTG
GAAACTAAGAGAATGATGTACCTAGAGGGCGCTGGAAGCTCTAAAGCCCTAGCAGTTACTGCTT
TTACTATTAGTGGTCGTTTTTTTCTCCCCCCCGCCCCCCGACAAATCAACAGAACAAAGAAAAT
TACCTAAACAGCAAGGACATAGGGAGGAACTTCTTGGCACAGAACTTTCCAAACACTTTTTCCT
GAAGGGATACAAGAAGCAAGAAAGGTACTCTTTCACTAGGACCTTCTCTGAGCTGTCCTCAGGA
TGCTTTTGGGACTATTTTTCTTACCCAGAGAATGGAGAAACCCTGCAGGGAATTCCCAAGCTGT
AGTTATAAACAGAAGTTCTCCTTCTGCTAGGTAGCATTCAAAGATCTTAATCTTCTGGGTTTCC
GTTTTCTCGAATGAAAAATGCAGGTCCGAGCAGTTAACTGGCTGGGGCACCATTAGCAAGTCAC
TTAGCATCTCTGGGGCCAGTCTGCAAAGCGAGGGGGCAGCCTTAATGTGCCTCCAGCCTGAAGT
CCTAGAATGAGCGCCCGGTGTCCCAAGCTGGGGCGCGCACCCCAGATCGGAGGGCGCCGATGTA
CAGACAGCAAACTCACCCAGTCTAGTGCATGCCTTCTTAAACATCACGAGACTCTAAGAAAAGG
AAACTGAAAACGGGAAAGTCCCTCTCTCTAACCTGGCACTGCGTCGCTGGCTTGGAGACAGGTG
ACGGTCCCTGCGGGCCTTGTCCTGATTGGCTGGGCACGCGTTTAATATAAGTGGAGGCGTCGCG
CTGGCGGGCATTCCTGAAGCTGACAGCATTCGGGCCGAGATGTCTCGCTCCGTGGCCTTAGCTG
TGCTCGCGCTACTCTCTCTTTCTGGCCTGGAGGCTATCCAGCGTGAGTCTCTCCTACCCTCCCG
CTCTGGTCCTTCCTCTCCCGCTCTGCACCCTCTGTGGCCCTCGCTGTGCTCTCTCGCTCCGTGA
CTTCCCTTCTCCAAGTTCTCCTTGGTGGCCCGCCGTGGGGCTAGTCCAGGGCTGGATCTCGGGG
AAGCGGCGGGGTGGCCTGGGAGTGGGGAAGGGGGTGCGCACCCGGGACGCGCGCTACTTGCCCC
TTTCGGCGGGGAGCAGGGGAGACCTTTGGCCTACGGCGACGGGAGGGTCGGGACAAAGTTTAGG
GCGTCGATAAGCGTCAGAGCGCCGAGGTTGGGGGAGGGTTTCTCTTCCGCTCTTTCGCGGGGCC
TCTGGCTCCCCCAGCGCAGCTGGAGTGGGGGACGGGTAGGCTCGTCCCAAAGGCGCGGCGCTGA
GGTTTGTGAACGCGTGGAGGGGCGCTTGGGGTCTGGGGGAGGCGTCGCCCGGGTAAGCCTGTCT
GCTGCGGCTCTGCTTCCCTTAGACTGGAGAGCTGTGGACTTCGTCTAGGCGCCCGCTAAGTTCG
CATGTCCTAGCACCTCTGGGTCTATGTGGGGCCACACCGTGGGGAGGAAACAGCACGCGACGTT
TGTAGAATGCTTGGCTGTGATACAAAGCGGTTTCGAATAATTAACTTATTTGTTCCCATCACAT
GTCACTTTTAAAAAATTATAAGAACTACCCGTTATTGACATCTTTCTGTGTGCCAAGGACTTTA
TGTGCTTTGCGTCATTTAATTTTGAAAACAGTTATCTTCCGCCATAGATAACTACTATGGTTAT
CTTCTGCCTCTCACAGATGAAGAAACTAAGGCACCGAGATTTTAAGAAACTTAATTACACAGGG
GATAAATGGCAGCAATCGAGATTGAAGTCAAGCCTAACCAGGGCTTTTGCGGGAGCGCATGCCT
TTTGGCTGTAATTCGTGCATTTTTTTTTAAGAAAAACGCCTGCCTTCTGCGTGAGATTCTCCAG
AGCAAACTGGGCGGCATGGGCCCTGTGGTCTTTTCGTACAGAGGGCTTCCTCTTTGGCTCTTTG
CCTGGTTGTTTCCAAGATGTACTGTGCCTCTTACTTTCGGTTTTGAAAACATGAGGGGGTTGGG
CGTGGTAGCTTACGCCTGTAATCCCAGCACTTAGGGAGGCCGAGGCGGGAGGATGGCTTGAGGT
CCGTAGTTGAGACCAGCCTGGCCAACATGGTGAAGCCTGGTCTCTACAAAAAATAATAACAAAA
ATTAGCCGGGTGTGGTGGCTCGTGCCTGTGGTCCCAGCTGCTCCGGTGGCTGAGGCGGGAGGAT
CTCTTGAGCTTAGGCTTTTGAGCTATCATGGCGCCAGTGCACTCCAGCGTGGGCAACAGAGCGA
GACCCTGTCTCTCAAAAAAGAAAAAAAAAAAAAAAGAAAGAGAAAAGAAAAGAAAGAAAGAAGT
GAAGGTTTGTCAGTCAGGGGAGCTGTAAAACCATTAATAAAGATAATCCAAGATGGTTACCAAG
ACTGTTGAGGACGCCAGAGATCTTGAGCACTTTCTAAGTACCTGGCAATACACTAAGCGCGCTC
ACCTTTTCCTCTGGCAAAACATGATCGAAAGCAGAATGTTTTGATCATGAGAAAATTGCATTTA
ATTTGAATACAATTTATTTACAACATAAAGGATAATGTATATATCACCACCATTACTGGTATTT
GCTGGTTATGTTAGATGTCATTTTAAAAAATAACAATCTGATATTTAAAAAAAAATCTTATTTT
GAAAATTTCCAAAGTAATACATGCCATGCATAGACCATTTCTGGAAGATACCACAAGAAACATG
TAATGATGATTGCCTCTGAAGGTCTATTTTCCTCCTCTGACCTGTGTGTGGGTTTTGTTTTTGT
TTTACTGTGGGCATAAATTAATTTTTCAGTTAAGTTTTGGAAGCTTAAATAACTCTCCAAAAGT
CATAAAGCCAGTAACTGGTTGAGCCCAAATTCAAACCCAGCCTGTCTGATACTTGTCCTCTTCT
TAGAAAAGATTACAGTGATGCTCTCACAAAATCTTGCCGCCTTCCCTCAAACAGAGAGTTCCAG
GCAGGATGAATCTGTGCTCTGATCCCTGAGGCATTTAATATGTTCTTATTATTAGAAGCTCAGA
TGCAAAGAGCTCTCTTAGCTTTTAATGTTATGAAAAAAATCAGGTCTTCATTAGATTCCCCAAT
CCACCTCTTGATGGGGCTAGTAGCCTTTCCTTAATGATAGGGTGTTTCTAGAGAGATATATCTG
GTCAAGGTGGCCTGGTACTCCTCCTTCTCCCCACAGCCTCCCAGACAAGGAGGAGTAGCTGCCT
TTTAGTGATCATGTACCCTGAATATAAGTGTATTTAAAAGAATTTTATACACATATATTTAGTG
TCAATCTGTATATTTAGTAGCACTAACACTTCTCTTCATTTTCAATGAAAAATATAGAGTTTAT
AATATTTTCTTCCCACTTCCCCATGGATGGTCTAGTCATGCCTCTCATTTTGGAAAGTACTGTT
TCTGAAACATTAGGCAATATATTCCCAACCTGGCTAGTTTACAGCAATCACCTGTGGATGCTAA
TTAAAACGCAAATCCCACTGTCACATGCATTACTCCATTTGATCATAATGGAAAGTATGTTCTG
TCCCATTTGCCATAGTCCTCACCTATCCCTGTTGTATTTTATCGGGTCCAACTCAACCATTTAA
GGTATTTGCCAGCTCTTGTATGCATTTAGGTTTTGTTTCTTTGTTTTTTAGCTCATGAAATTAG
GTACAAAGTCAGAGAGGGGTCTGGCATATAAAACCTCAGCAGAAATAAAGAGGTTTTGTTGTTT
GGTAAGAACATACCTTGGGTTGGTTGGGCACGGTGGCTCGTGCCTGTAATCCCAACACTTTGGG
AGGCCAAGGCAGGCTGATCACTTGAAGTTGGGAGTTCAAGACCAGCCTGGCCAACATGGTGAAA
TCCCGTCTCTACTGAAAATACAAAAATTAACCAGGCATGGTGGTGTGTGCCTGTAGTCCCAGGA
ATCACTTGAACCCAGGAGGCGGAGGTTGCAGTGAGCTGAGATCTCACCACTGCACACTGCACTC
CAGCCTGGGCAATGGAATGAGATTCCATCCCAAAAAATAAAAAAATAAAAAAATAAAGAACATA
CCTTGGGTTGATCCACTTAGGAACCTCAGATAATAACATCTGCCACGTATAGAGCAATTGCTAT
GTCCCAGGCACTCTACTAGACACTTCATACAGTTTAGAAAATCAGATGGGTGTAGATCAAGGCA
GGAGCAGGAACCAAAAAGAAAGGCATAAACATAAGAAAAAAAATGGAAGGGGTGGAAACAGAGT
ACAATAACATGAGTAATTTGATGGGGGCTATTATGAACTGAGAAATGAACTTTGAAAAGTATCT
TGGGGCCAAATCATGTAGACTCTTGAGTGATGTGTTAAGGAATGCTATGAGTGCTGAGAGGGCA
TCAGAAGTCCTTGAGAGCCTCCAGAGAAAGGCTCTTAAAAATGCAGCGCAATCTCCAGTGACAG
AAGATACTGCTAGAAATCTGCTAGAAAAAAAACAAAAAAGGCATGTATAGAGGAATTATGAGGG
AAAGATACCAAGTCACGGTTTATTCTTCAAAATGGAGGTGGCTTGTTGGGAAGGTGGAAGCTCA
TTTGGCCAGAGTGGAAATGGAATTGGGAGAAATCGATGACCAAATGTAAACACTTGGTGCCTGA
TATAGCTTGACACCAAGTTAGCCCCAAGTGAAATACCCTGGCAATATTAATGTGTCTTTTCCCG
ATATTCCTCAGGTACTCCAAAGATTCAGGTTTACTCACGTCATCCAGCAGAGAATGGAAAGTCA
AATTTCCTGAATTGCTATGTGTCTGGGTTTCATCCATCCGACATTGAAGTTGACTTACTGAAGA
ATGGAGAGAGAATTGAAAAAGTGGAGCATTCAGACTTGTCTTTCAGCAAGGACTGGTCTTTCTA
TCTCTTGTACTACACTGAATTCACCCCCACTGAAAAAGATGAGTATGCCTGCCGTGTGAACCAT
GTGACTTTGTCACAGCCCAAGATAGTTAAGTGGGGTAAGTCTTACATTCTTTTGTAAGCTGCTG
AAAGTTGTGTATGAGTAGTCATATCATAAAGCTGCTTTGATATAAAAAAGGTCTATGGCCATAC
TACCCTGAATGAGTCCCATCCCATCTGATATAAACAATCTGCATATTGGGATTGTCAGGGAATG
TTCTTAAAGATCAGATTAGTGGCACCTGCTGAGATACTGATGCACAGCATGGTTTCTGAACCAG
TAGTTTCCCTGCAGTTGAGCAGGGAGCAGCAGCAGCACTTGCACAAATACATATACACTCTTAA
CACTTCTTACCTACTGGCTTCCTCTAGCTTTTGTGGCAGCTTCAGGTATATTTAGCACTGAACG
AACATCTCAAGAAGGTATAGGCCTTTGTTTGTAAGTCCTGCTGTCCTAGCATCCTATAATCCTG
GACTTCTCCAGTACTTTCTGGCTGGATTGGTATCTGAGGCTAGTAGGAAGGGCTTGTTCCTGCT
GGGTAGCTCTAAACAATGTATTCATGGGTAGGAACAGCAGCCTATTCTGCCAGCCTTATTTCTA
ACCATTTTAGACATTTGTTAGTACATGGTATTTTAAAAGTAAAACTTAATGTCTTCCTTTTTTT
TCTCCACTGTCTTTTTCATAGATCGAGACATGTAAGCAGCATCATGGAGGTAAGTTTTTGACCT
TGAGAAAATGTTTTTGTTTCACTGTCCTGAGGACTATTTATAGACAGCTCTAACATGATAACCC
TCACTATGTGGAGAACATTGACAGAGTAACATTTTAGCAGGGAAAGAAGAATCCTACAGGGTCA
TGTTCCCTTCTCCTGTGGAGTGGCATGAAGAAGGTGTATGGCCCCAGGTATGGCCATATTACTG
ACCCTCTACAGAGAGGGCAAAGGAACTGCCAGTATGGTATTGCAGGATAAAGGCAGGTGGTTAC
CCACATTACCTGCAAGGCTTTGATCTTTCTTCTGCCATTTCCACATTGGACATCTCTGCTGAGG
AGAGAAAATGAACCACTCTTTTCCTTTGTATAATGTTGTTTTATTCTTCAGACAGAAGAGAGGA
GTTATACAGCTCTGCAGACATCCCATTCCTGTATGGGGACTGTGTTTGCCTCTTAGAGGTTCCC
AGGCCACTAGAGGAGATAAAGGGAAACAGATTGTTATAACTTGATATAATGATACTATAATAGA
TGTAACTACAAGGAGCTCCAGAAGCAAGAGAGAGGGAGGAACTTGGACTTCTCTGCATCTTTAG
TTGGAGTCCAAAGGCTTTTCAATGAAATTCTACTGCCCAGGGTACATTGATGCTGAAACCCCAT
TCAAATCTCCTGTTATATTCTAGAACAGGGAATTGATTTGGGAGAGCATCAGGAAGGTGGATGA
TCTGCCCAGTCACACTGTTAGTAAATTGTAGAGCCAGGACCTGAACTCTAATATAGTCATGTGT
TACTTAATGACGGGGACATGTTCTGAGAAATGCTTACACAAACCTAGGTGTTGTAGCCTACTAC
ACGCATAGGCTACATGGTATAGCCTATTGCTCCTAGACTACAAACCTGTACAGCCTGTTACTGT
ACTGAATACTGTGGGCAGTTGTAACACAATGGTAAGTATTTGTGTATCTAAACATAGAAGTTGC
AGTAAAAATATGCTATTTTAATCTTATGAGACCACTGTCATATATACAGTCCATCATTGACCAA
AACATCATATCAGCATTTTTTCTTCTAAGATTTTGGGAGCACCAAAGGGATACACTAACAGGAT
ATACTCTTTATAATGGGTTTGGAGAACTGTCTGCAGCTACTTCTTTTAAAAAGGTGATCTACAC
AGTAGAAATTAGACAAGTTTGGTAATGAGATCTGCAATCCAAATAAAATAAATTCATTGCTAAC
CTTTTTCTTTTCTTTTCAGGTTTGAAGATGCCGCATTTGGATTGGATGAATTCCAAATTCTGCT
TGCTTGCTTTTTAATATTGATATGCTTATACACTTACACTTTATGCACAAAATGTAGGGTTATA
ATAATGTTAACATGGACATGATCTTCTTTATAATTCTACTTTGAGTGCTGTCTCCATGTTTGAT
GTATCTGAGCAGGTTGCTCCACAGGTAGCTCTAGGAGGGCTGGCAACTTAGAGGTGGGGAGCAG
AGAATTCTCTTATCCAACATCAACATCTTGGTCAGATTTGAACTCTTCAATCTCTTGCACTCAA
AGCTTGTTAAGATAGTTAAGCGTGCATAAGTTAACTTCCAATTTACATACTCTGCTTAGAATTT
GGGGGAAAATTTAGAAATATAATTGACAGGATTATTGGAAATTTGTTATAATGAATGAAACATT
TTGTCATATAAGATTCATATTTACTTCTTATACATTTGATAAAGTAAGGCATGGTTGTGGTTAA
TCTGGTTTATTTTTGTTCCACAAGTTAAATAAATCATAAAACTTGATGTGTTATCTCTTATATC
TCACTCCCACTATTACCCCTTTATTTTCAAACAGGGAAACAGTCTTCAAGTTCCACTTGGTAAA
AAATGTGAACCCCTTGTATATAGAGTTTGGCTCACAGTGTAAAGGGCCTCAGTGATTCACATTT
TCCAGATTAGGAATCTGATGCTCAAAGAAGTTAAATGGCATAGTTGGGGTGACACAGCTGTCTA
GTGGGAGGCCAGCCTTCTATATTTTAGCCAGCGTTCTTTCCTGCGGGCCAGGTCATGAGGAGTA
TGCAGACTCTAAGAGGGAGCAAAAGTATCTGAAGGATTTAATATTTTAGCAAGGAATAGATATA
CAATCATCCCTTGGTCTCCCTGGGGGATTGGTTTCAGGACCCCTTCTTGGACACCAAATCTATG
GATATTTAAGTCCCTTCTATAAAATGGTATAGTATTTGCATATAACCTATCCACATCCTCCTGT
ATACTTTAAATCATTTCTAGATTACTTGTAATACCTAATACAATGTAAATGCTATGCAAATAGT
TGTTATTGTTTAAGGAATAATGACAAGAAAAAAAAGTCTGTACATGCTCAGTAAAGACACAACC
ATCCCTTTTTTTCCCCAGTGTTTTTGATCCATGGTTTGCTGAATCCACAGATGTGGAGCCCCTG
GATACGGAAGGCCCGCTGTACTTTGAATGACAAATAACAGATTTAAA.

[0084] By “base editing activity” is meant acting to chemically alter a base within a polynucleotide. In one embodiment, a first base is converted to a second base. In one embodiment, the base editing activity is cytidine deaminase activity, e.g., converting target C·G to T·A. In another embodiment, the base editing activity is adenosine or adenine deaminase activity, e.g., converting A·T to G·C.

[0085] The term “base editor system” refers to an intermolecular complex for editing a nucleobase of a target nucleotide sequence. In various embodiments, the base editor (BE) system comprises (1) a polynucleotide programmable nucleotide binding domain, a deaminase domain (e.g., cytidine deaminase or adenosine deaminase) for deaminating nucleobases in the target nucleotide sequence; and (2) one or more guide polynucleotides (e.g., guide RNA) in conjunction with the polynucleotide programmable nucleotide binding domain. In various embodiments, the base editor (BE) system comprises a nucleobase editor domain selected from an adenosine deaminase or a cytidine deaminase, and a domain having nucleic acid sequence specific binding activity. In some embodiments, the base editor system comprises (1) a base editor (BE) comprising a polynucleotide programmable DNA binding domain and a deaminase domain for deaminating one or more nucleobases in a target nucleotide sequence; and (2) one or more guide RNAs in conjunction with the polynucleotide programmable DNA binding domain. In some embodiments, the polynucleotide programmable nucleotide binding domain is a polynucleotide programmable DNA binding domain. In some embodiments, the base editor is a cytidine base editor (CBE). In some embodiments, the base editor is an adenine or adenosine base editor (ABE). In some embodiments, the base editor is an adenine or adenosine base editor (ABE) or a cytidine or cytosine base editor (CBE).

[0086] The term “Cas9” or “Cas9 domain” refers to an RNA guided nuclease comprising a Cas9 protein, or a fragment thereof (e.g., a protein comprising an active, inactive, or partially active DNA cleavage domain of Cas9, and/or the gRNA binding domain of Cas9). A Cas9 nuclease is also referred to sometimes as a casn1 nuclease or a CRISPR (clustered regularly interspaced short palindromic repeat) associated nuclease.

[0087] By “chimeric antigen receptor” or “CAR” is meant a synthetic or engineered receptor comprising an extracellular antigen binding domain joined to one or more intracellular signaling domains (e.g., T cell signaling domain) that confers specificity for an antigen onto an immune effector cell.

[0088] By “chimeric antigen receptor T cell” or “CAR-T cell” is meant a T cell expressing a CAR that has antigen specificity determined by the antibody-derived targeting domain of the CAR. As used herein, “CAR-T cells” includes T cells or NK cells. As used herein, “CAR-T cells” include cells engineered to express a CAR or a T cell receptor (TCR). Methods of making CARs (e.g., for treatment of cancer) are publicly available (see, e.g., Park et al., Trends Biotechnol., 29:550-557, 2011; Grupp et al., N Engl J Med., 368:1509-1518, 2013; Han et al., J. Hematol Oncol. 6:47, 2013; Haso et al., (2013) Blood, 121, 1165-1174; PCT Pubs. WO2012/079000, WO2013/059593; and U.S. Pub. 2012/0213783, each of which is incorporated by reference herein in its entirety).

[0089] By “class II, major histocompatibility complex, transactivator (CIITA) polypeptide” is meant a protein having at least about 85% amino acid sequence identity to NCBI Accession No. NP_001273331.1, which is provided below, or a fragment thereof having DNA binding activity.
[0090] >NP_001273331.1 MHC class II transactivator isoform 1 [Homo sapiens]

(SEQ ID NO: 469)
MRCLAPRPAGSYLSEPQGSSQCATMELGPLEGGYLELLNSDADPLCLYHF
YDQMDLAGEEEIELYSEPDTDTINCDQFSRLLCDMEGDEETREAYANIAE
LDQYVFQDSQLEGLSKDIFIEHIGPDEVIGESMEMPAEVGQKSQKRPFPE
ELPADLKHWKPAEPPTVVTGSLLVGPVSDCSTLPCLPLPALFNQEPASGQ
MRLEKTDQIPMPFSSSSLSCLNLPEGPIQFVPTISTLPHGLWQISEAGTG
VSSIFIYHGEVPQASQVPPPSGFTVHGLPTSPDRPGSTSPFAPSATDLPS
MPEPALTSRANMTEHKTSPTQCPAAGEVSNKLPKWPEPVEQFYRSLQDTY
GAEPAGPDGILVEVDLVQARLERSSSKSLERELATPDWAERQLAQGGLAE
VLLAAKEHRRPRETRVIAVLGKAGQGKSYWAGAVSRAWACGRLPQYDFVF
SVPCHCLNRPGDAYGLQDLLFSLGPQPLVAADEVFSHILKRPDRVLLILD
GFEELEAQDGFLHSTCGPAPAEPCSLRGLLAGLFQKKLLRGCTLLLTARP
RGRLVQSLSKADALFELSGFSMEQAQAYVMRYFESSGMTEHQDRALTLLR
DRPLLLSHSHSPTLCRAVCQLSEALLELGEDAKLPSTLTGLYVGLLGRAA
LDSPPGALAELAKLAWELGRRHQSTLQEDQFPSADVRTWAMAKGLVQHPP
RAAESELAFPSFLLQCFLGALWLALSGEIKDKELPQYLALTPRKKRPYDN
WLEGVPRFLAGLIFQPPARCLGALLGPSAAASVDRKQKVLARYLKRLQPG
TLRARQLLELLHCAHEAEEAGIWQHVVQELPGRLSFLGTRLTPPDAHVLG
KALEAAGQDFSLDLRSTGICPSGLGSLVGLSCVTRFRAALSDTVALWESL
QQHGETKLLQAAEEKFTIEPFKAKSLKDVEDLGKLVQTQRTRSSSEDTAG
ELPAVRDLKKLEFALGPVSGPQAFPKLVRILTAFSSLQHLDLDALSENKI
GDEGVSQLSATFPQLKSLETLNLSQNNITDLGAYKLAEALPSLAASLLRL
SLYNNCICDVGAESLARVLPDMVSLRVMDVQYNKFTAAGAQQLAASLRRC
PHVETLAMWTPTIPFSVQEHLQQQDSRISLR.

[0091] By “class II, major histocompatibility complex, transactivator (CIITA) polynucleotide” is meant a nucleic acid molecule encoding an CIITA polypeptide, as well as the introns, exons, 3′ untranslated regions, 5′ untranslated regions, and regulatory sequences associated with its expression, or fragments thereof. An exemplary CIITA polynucleotide is provided at NCBI Accession No. NM_001286402.1, which is provide below.
[0092] >NM_001286402.1 Homo sapiens class II major histocompatibility complex transactivator (CIITA), transcript variant 1, mRNA

(SEQ ID NO: 470)
GGTTAGTGATGAGGCTAGTGATGAGGCTGTGTGCTTCTGAGCTGGGCATCCGAAGGCATCCTTG
GGGAAGCTGAGGGCACGAGGAGGGGCTGCCAGACTCCGGGAGCTGCTGCCTGGCTGGGATTCCT
ACACAATGCGTTGCCTGGCTCCACGCCCTGCTGGGTCCTACCTGTCAGAGCCCCAAGGCAGCTC
ACAGTGTGCCACCATGGAGTTGGGGCCCCTAGAAGGTGGCTACCTGGAGCTTCTTAACAGCGAT
GCTGACCCCCTGTGCCTCTACCACTTCTATGACCAGATGGACCTGGCTGGAGAAGAAGAGATTG
AGCTCTACTCAGAACCCGACACAGACACCATCAACTGCGACCAGTTCAGCAGGCTGTTGTGTGA
CATGGAAGGTGATGAAGAGACCAGGGAGGCTTATGCCAATATCGCGGAACTGGACCAGTATGTC
TTCCAGGACTCCCAGCTGGAGGGCCTGAGCAAGGACATTTTCATAGAGCACATAGGACCAGATG
AAGTGATCGGTGAGAGTATGGAGATGCCAGCAGAAGTTGGGCAGAAAAGTCAGAAAAGACCCTT
CCCAGAGGAGCTTCCGGCAGACCTGAAGCACTGGAAGCCAGCTGAGCCCCCCACTGTGGTGACT
GGCAGTCTCCTAGTGGGACCAGTGAGCGACTGCTCCACCCTGCCCTGCCTGCCACTGCCTGCGC
TGTTCAACCAGGAGCCAGCCTCCGGCCAGATGCGCCTGGAGAAAACCGACCAGATTCCCATGCC
TTTCTCCAGTTCCTCGTTGAGCTGCCTGAATCTCCCTGAGGGACCCATCCAGTTTGTCCCCACC
ATCTCCACTCTGCCCCATGGGCTCTGGCAAATCTCTGAGGCTGGAACAGGGGTCTCCAGTATAT
TCATCTACCATGGTGAGGTGCCCCAGGCCAGCCAAGTACCCCCTCCCAGTGGATTCACTGTCCA
CGGCCTCCCAACATCTCCAGACCGGCCAGGCTCCACCAGCCCCTTCGCTCCATCAGCCACTGAC
CTGCCCAGCATGCCTGAACCTGCCCTGACCTCCCGAGCAAACATGACAGAGCACAAGACGTCCC
CCACCCAATGCCCGGCAGCTGGAGAGGTCTCCAACAAGCTTCCAAAATGGCCTGAGCCGGTGGA
GCAGTTCTACCGCTCACTGCAGGACACGTATGGTGCCGAGCCCGCAGGCCCGGATGGCATCCTA
GTGGAGGTGGATCTGGTGCAGGCCAGGCTGGAGAGGAGCAGCAGCAAGAGCCTGGAGCGGGAAC
TGGCCACCCCGGACTGGGCAGAACGGCAGCTGGCCCAAGGAGGCCTGGCTGAGGTGCTGTTGGC
TGCCAAGGAGCACCGGCGGCCGCGTGAGACACGAGTGATTGCTGTGCTGGGCAAAGCTGGTCAG
GGCAAGAGCTATTGGGCTGGGGCAGTGAGCCGGGCCTGGGCTTGTGGCCGGCTTCCCCAGTACG
ACTTTGTCTTCTCTGTCCCCTGCCATTGCTTGAACCGTCCGGGGGATGCCTATGGCCTGCAGGA
TCTGCTCTTCTCCCTGGGCCCACAGCCACTCGTGGCGGCCGATGAGGTTTTCAGCCACATCTTG
AAGAGACCTGACCGCGTTCTGCTCATCCTAGACGGCTTCGAGGAGCTGGAAGCGCAAGATGGCT
TCCTGCACAGCACGTGCGGACCGGCACCGGCGGAGCCCTGCTCCCTCCGGGGGCTGCTGGCCGG
CCTTTTCCAGAAGAAGCTGCTCCGAGGTTGCACCCTCCTCCTCACAGCCCGGCCCCGGGGCCGC
CTGGTCCAGAGCCTGAGCAAGGCCGACGCCCTATTTGAGCTGTCCGGCTTCTCCATGGAGCAGG
CCCAGGCATACGTGATGCGCTACTTTGAGAGCTCAGGGATGACAGAGCACCAAGACAGAGCCCT
GACGCTCCTCCGGGACCGGCCACTTCTTCTCAGTCACAGCCACAGCCCTACTTTGTGCCGGGCA
GTGTGCCAGCTCTCAGAGGCCCTGCTGGAGCTTGGGGAGGACGCCAAGCTGCCCTCCACGCTCA
CGGGACTCTATGTCGGCCTGCTGGGCCGTGCAGCCCTCGACAGCCCCCCCGGGGCCCTGGCAGA
GCTGGCCAAGCTGGCCTGGGAGCTGGGCCGCAGACATCAAAGTACCCTACAGGAGGACCAGTTC
CCATCCGCAGACGTGAGGACCTGGGCGATGGCCAAAGGCTTAGTCCAACACCCACCGCGGGCCG
CAGAGTCCGAGCTGGCCTTCCCCAGCTTCCTCCTGCAATGCTTCCTGGGGGCCCTGTGGCTGGC
TCTGAGTGGCGAAATCAAGGACAAGGAGCTCCCGCAGTACCTAGCATTGACCCCAAGGAAGAAG
AGGCCCTATGACAACTGGCTGGAGGGCGTGCCACGCTTTCTGGCTGGGCTGATCTTCCAGCCTC
CCGCCCGCTGCCTGGGAGCCCTACTCGGGCCATCGGCGGCTGCCTCGGTGGACAGGAAGCAGAA
GGTGCTTGCGAGGTACCTGAAGCGGCTGCAGCCGGGGACACTGCGGGCGCGGCAGCTGCTGGAG
CTGCTGCACTGCGCCCACGAGGCCGAGGAGGCTGGAATTTGGCAGCACGTGGTACAGGAGCTCC
CCGGCCGCCTCTCTTTTCTGGGCACCCGCCTCACGCCTCCTGATGCACATGTACTGGGCAAGGC
CTTGGAGGCGGCGGGCCAAGACTTCTCCCTGGACCTCCGCAGCACTGGCATTTGCCCCTCTGGA
TTGGGGAGCCTCGTGGGACTCAGCTGTGTCACCCGTTTCAGGGCTGCCTTGAGCGACACGGTGG
CGCTGTGGGAGTCCCTGCAGCAGCATGGGGAGACCAAGCTACTTCAGGCAGCAGAGGAGAAGTT
CACCATCGAGCCTTTCAAAGCCAAGTCCCTGAAGGATGTGGAAGACCTGGGAAAGCTTGTGCAG
ACTCAGAGGACGAGAAGTTCCTCGGAAGACACAGCTGGGGAGCTCCCTGCTGTTCGGGACCTAA
AGAAACTGGAGTTTGCGCTGGGCCCTGTCTCAGGCCCCCAGGCTTTCCCCAAACTGGTGCGGAT
CCTCACGGCCTTTTCCTCCCTGCAGCATCTGGACCTGGATGCGCTGAGTGAGAACAAGATCGGG
GACGAGGGTGTCTCGCAGCTCTCAGCCACCTTCCCCCAGCTGAAGTCCTTGGAAACCCTCAATC
TGTCCCAGAACAACATCACTGACCTGGGTGCCTACAAACTCGCCGAGGCCCTGCCTTCGCTCGC
TGCATCCCTGCTCAGGCTAAGCTTGTACAATAACTGCATCTGCGACGTGGGAGCCGAGAGCTTG
GCTCGTGTGCTTCCGGACATGGTGTCCCTCCGGGTGATGGACGTCCAGTACAACAAGTTCACGG
CTGCCGGGGCCCAGCAGCTCGCTGCCAGCCTTCGGAGGTGTCCTCATGTGGAGACGCTGGCGAT
GTGGACGCCCACCATCCCATTCAGTGTCCAGGAACACCTGCAACAACAGGATTCACGGATCAGC
CTGAGATGATCCCAGCTGTGCTCTGGACAGGCATGTTCTCTGAGGACACTAACCACGCTGGACC
TTGAACTGGGTACTTGTGGACACAGCTCTTCTCCAGGCTGTATCCCATGAGCCTCAGCATCCTG
GCACCCGGCCCCTGCTGGTTCAGGGTTGGCCCCTGCCCGGCTGCGGAATGAACCACATCTTGCT
CTGCTGACAGACACAGGCCCGGCTCCAGGCTCCTTTAGCGCCCAGTTGGGTGGATGCCTGGTGG
CAGCTGCGGTCCACCCAGGAGCCCCGAGGCCTTCTCTGAAGGACATTGCGGACAGCCACGGCCA
GGCCAGAGGGAGTGACAGAGGCAGCCCCATTCTGCCTGCCCAGGCCCCTGCCACCCTGGGGAGA
AAGTACTTCTTTTTTTTTATTTTTAGACAGAGTCTCACTGTTGCCCAGGCTGGCGTGCAGTGGT
GCGATCTGGGTTCACTGCAACCTCCGCCTCTTGGGTTCAAGCGATTCTTCTGCTTCAGCCTCCC
GAGTAGCTGGGACTACAGGCACCCACCATCATGTCTGGCTAATTTTTCATTTTTAGTAGAGACA
GGGTTTTGCCATGTTGGCCAGGCTGGTCTCAAACTCTTGACCTCAGGTGATCCACCCACCTCAG
CCTCCCAAAGTGCTGGGATTACAAGCGTGAGCCACTGCACCGGGCCACAGAGAAAGTACTTCTC
CACCCTGCTCTCCGACCAGACACCTTGACAGGGCACACCGGGCACTCAGAAGACACTGATGGGC
AACCCCCAGCCTGCTAATTCCCCAGATTGCAACAGGCTGGGCTTCAGTGGCAGCTGCTTTTGTC
TATGGGACTCAATGCACTGACATTGTTGGCCAAAGCCAAAGCTAGGCCTGGCCAGATGCACCAG
CCCTTAGCAGGGAAACAGCTAATGGGACACTAATGGGGCGGTGAGAGGGGAACAGACTGGAAGC
ACAGCTTCATTTCCTGTGTCTTTTTTCACTACATTATAAATGTCTCTTTAATGTCACAGGCAGG
TCCAGGGTTTGAGTTCATACCCTGTTACCATTTTGGGGTACCCACTGCTCTGGTTATCTAATAT
GTAACAAGCCACCCCAAATCATAGTGGCTTAAAACAACACTCACATTTA.

[0093] The term “conservative amino acid substitution” or “conservative mutation” refers to the replacement of one amino acid by another amino acid with a common property. A functional way to define common properties between individual amino acids is to analyze the normalized frequencies of amino acid changes between corresponding proteins of homologous organisms (Schulz, G. E. and Schirmer, R. H., Principles of Protein Structure, Springer-Verlag, New York (1979)). According to such analyses, groups of amino acids can be defined where amino acids within a group exchange preferentially with each other, and therefore resemble each other most in their impact on the overall protein structure (Schulz, G. E. and Schirmer, R. H., supra). Non-limiting examples of conservative mutations include amino acid substitutions of amino acids, for example, lysine for arginine and vice versa such that a positive charge can be maintained; glutamic acid for aspartic acid and vice versa such that a negative charge can be maintained; serine for threonine such that a free —OH can be maintained; and glutamine for asparagine such that a free —NH₂ can be maintained.

[0094] The term “coding sequence” or “protein coding sequence” as used interchangeably herein refers to a segment of a polynucleotide that codes for a protein. Coding sequences can also be referred to as open reading frames. The region or sequence is bounded nearer the 5′ end by a start codon and nearer the 3′ end with a stop codon. Stop codons useful with the base editors described herein include the following:

| | |
|---|---|
| Glutamine | CAG → TAG Stop codon |
| | CAA → TAA |
| Arginine | CGA → TGA |
| Tryptophan | TGG → TGA |
| | TGG → TAG |
| | TGG → TAA |

[0095] By “complex” is meant a combination of two or more molecules whose interaction relies on inter-molecular forces. Non-limiting examples of inter-molecular forces include covalent and non-covalent interactions. Non-limiting examples of non-covalent interactions include hydrogen bonding, ionic bonding, halogen bonding, hydrophobic bonding, van der Waals interactions (e.g., dipole-dipole interactions, dipole-induced dipole interactions, and London dispersion forces), and π-effects. In an embodiment, a complex comprises polypeptides, polynucleotides, or a combination of one or more polypeptides and one or more polynucleotides. In one embodiment, a complex comprises one or more polypeptides that associate to form a base editor (e.g., base editor comprising a nucleic acid programmable DNA binding protein, such as Cas9, and a deaminase) and a polynucleotide (e.g., a guide RNA). In an embodiment, the complex is held together by hydrogen bonds. It should be appreciated that one or more components of a base editor (e.g., a deaminase, or a nucleic acid programmable DNA binding protein) may associate covalently or non-covalently. As one example, a base editor may include a deaminase covalently linked to a nucleic acid programmable DNA binding protein (e.g., by a peptide bond). Alternatively, a base editor may include a deaminase and a nucleic acid programmable DNA binding protein that associate noncovalently (e.g., where one or more components of the base editor are supplied in trans and associate directly or via another molecule such as a protein or nucleic acid). In an embodiment, one or more components of the complex are held together by hydrogen bonds.

[0096] By “cytotoxic T lymphocyte-associated 4 (CTLA4) polypeptide” is meant a protein having at least about 85% amino acid sequence identity to NCBI Ref. Seq. accession No. NP_005205.2, which is provided below, or a functional fragment thereof having immunomodulatory activity.
[0097] >NP_005205.2 cytotoxic T-lymphocyte protein 4 isoform CTLA4-TM precursor [Homo sapiens]

(SEQ ID NO: 472)
MACLGFQRHKAQLNLATRTWPCTLLFFLLFIPVFCKAMHVAQPAVVLASS
RGIASFVCEYASPGKATEVRVTVLRQADSQVTEVCAATYMMGNELTFLDD
SICTGTSSGNQVNLTIQGLRAMDTGLYICKVELMYPPPYYLGIGNGTQIY
VIDPEPCPDSDFLLWILAAVSSGLFFYSFLLTAVSLSKMLKKRSPLTTGV
YVKMPPTEPECEKQFQPYFIPIN.

[0098] By “cytotoxic T lymphocyte-associated 4 (CTLA4) polynucleotide” is meant a nucleic acid molecule encoding a CTLA4 polypeptide, as well as the introns, exons, 3′ untranslated regions, 5′ untranslated regions, and regulatory sequences associated with its expression, or fragments thereof. An exemplary CTLA4 polynucleotide sequence is provided at Ensembl Accession No. ENSG00000163599.

[0099] By “Cytidine Base Editor (CBE)” is meant a base editor that comprises a cytidine deaminase.

[0100] By “Cytidine Base Editor (CBE) polynucleotide” is meant a polynucleotide that encodes a CBE.

[0101] By “cytidine deaminase” or “cytosine deaminase” is meant a polypeptide or fragment thereof capable of catalyzing the deamination of cytidine or cytosine. In one embodiment, the cytidine deaminase converts cytosine to uracil or 5-methylcytosine to thymine. The terms “cytidine deaminase” and “cytosine deaminase” are used interchangeably throughout the application. A cytidine deaminase may be derived from a mammal (e.g., human, swine, bovine, horse, monkey etc.). Exemplary cytidine deaminases include but are not limited to Petromyzon marinus cytosine deaminase 1 (PmCDA1) (exemplary PmCDA1 polypeptide sequences are provided in the Sequence Listing as SEQ ID NOs: 13-14), Activation-induced cytidine deaminase (AID; AICDA) (exemplary AID polypeptide sequences are provided in the Sequence Listing as SEQ ID NOs: 15-21), and APOBEC (exemplary APOBEC polypeptide sequences are provided in the Sequence Listing as SEQ ID NOs: 12-61). Further exemplary cytidine deaminase sequences are provided in the Sequence Listing as SEQ ID NOs: 62-66 and SEQ ID NOs:67-189.

[0102] By “cytosine” or “4-Aminopyrimidin-2(1H)-one” is meant a purine nucleobase with the molecular formula C₄H₅N₃O, having the structure

[chemical structure]

and corresponding to CAS No. 71-30-7.

[0103] By “cytidine” is meant a cytosine molecule attached to a ribose sugar via a glycosidic bond, having the structure

[chemical structure]

and corresponding to CAS No. 65-46-3. Its molecular formula is C₉H₁₃N₃O₅.

[0104] By “cytosine deaminase activity” is meant catalyzing the deamination of cytosine or cytidine. In one embodiment, a polypeptide having cytosine deaminase activity converts cytosine to uracil (i.e., C to U) or 5-methylcytosine to thymine (i.e., 5mC to T). In some embodiments, a cytosine deaminase variant as provided herein has an increased cytosine deaminase activity (e.g., at least 10-fold, 20-fold, 30-fold, 40-fold, 50-fold, 60-fold, 70-fold, 80-fold, 90-fold, 100-fold or more) relative to a reference cytosine deaminase.

[0105] The term “deaminase” or “deaminase domain,” as used herein, refers to a protein or fragment thereof that catalyzes a deamination reaction.

[0106] “Detect” refers to identifying the presence, absence or amount of the analyte to be detected. In one embodiment, a sequence alteration in a polynucleotide or polypeptide is detected. In another embodiment, the presence of indels is detected.

[0107] By “detectable label” is meant a composition that when linked to a molecule of interest renders the latter detectable, via spectroscopic, photochemical, biochemical, immunochemical, or chemical means. For example, useful labels include radioactive isotopes, magnetic beads, metallic beads, colloidal particles, fluorescent dyes, electron-dense reagents, enzymes (for example, as commonly used in an enzyme linked immunosorbent assay (ELISA)), biotin, digoxigenin, or haptens.

[0108] By “disease” is meant any condition or disorder that damages or interferes with the normal function of a cell, tissue, or organ. Exemplary diseases include diseases amenable to treatment with any of the modified immune cells or pharmaceutical compositions as provided herein. In some embodiments, a disease is a type of solid tumor. In some embodiments, the solid tumor is a lung solid tumor. In some embodiments, the solid tumor is an ovarian solid tumor. In embodiments, the disease is a cancer. In embodiments, the cancer and/or solid tumor is a glioma, thyroid cancer, lung cancer, colorectal cancer, esophageal cancer, head and neck (H&N) cancer, stomach cancer, liver cancer, carcinoid, pancreatic cancer, renal cancer, urothelial cancer, prostate cancer, a sarcoma, testis cancer, breast cancer, cervical cancer, endometrial cancer, ovarian cancer, a renal cell carcinoma (RCC), melanoma, skin cancer, uterine cancer, or lyphoma.

[0109] By “effective amount” is meant the amount of an agent or cell that is required to ameliorate the symptoms of a disease relative to an untreated patient or an individual without disease, i.e., a healthy individual, or is the amount of the agent or active compound sufficient to elicit a desired biological response. In some embodiments, the cell is a modified immune cell (e.g., T- or NK-cell), for example, an immune cell comprising an alteration that reduces or eliminates the expression of a polynucleotide or polypeptide of interest (e.g., a A2AR, A2BR, HIF1α, HIF1α.I3 polypeptide and/or polynucleotide). In some embodiments, the agent is a base editor as described herein, The effective amount of active compound(s) used to practice the present invention for therapeutic treatment of a disease varies depending upon the manner of administration, the age, body weight, and general health of the subject. Ultimately, the attending physician or veterinarian will decide the appropriate amount and dosage regimen. Such amount is referred to as an “effective” amount. In one embodiment, an effective amount is the amount of a base editor of the invention sufficient to introduce an alteration in a gene of interest in a cell (e.g., a cell in vitro or in vivo). In one embodiment, an effective amount is the amount of a base editor required to achieve a therapeutic effect. Such therapeutic effect need not be sufficient to alter a pathogenic gene in all cells of a subject, tissue or organ, but only to alter the pathogenic gene in about 1%, 5%, 10%, 25%, 50%, 75% or more of the cells present in a subject, tissue or organ. In one embodiment, an effective amount is the amount of a modified immune cell (e.g., T- or NK-cell) required to achieve a therapeutic effect (e.g., reduce or stabilize cancer cell proliferation, tumor burden, or cancer cell survival). In one embodiment, an effective amount is sufficient to ameliorate one or more symptoms of a disease (e.g., solid tumor).

[0110] By “fragment” is meant a portion of a polypeptide or nucleic acid molecule. This portion contains, at least about 10%, 20%, 30%, 40%, 50%, 60%, 70%, 80%, or 90% of the entire length of the reference nucleic acid molecule or polypeptide. A fragment may contain 10, 20, 30, 40, 50, 60, 70, 80, 90, or 100, 200, 300, 400, 500, 600, 700, 800, 900, or 1000 nucleotides or amino acids.

[0111] By “guide polynucleotide” is meant a polynucleotide or polynucleotide complex which is specific for a target sequence and can form a complex with a polynucleotide programmable nucleotide binding domain protein (e.g., Cas9 or Cpf1). In an embodiment, the guide polynucleotide is a guide RNA (gRNA). gRNAs can exist as a complex of two or more RNAs, or as a single RNA molecule. In some embodiments the guide polynucleotide contains a sequence selected from those listed in Tables 1A and 1B.

[0112] By “Human Leukocyte Antigen-E (HLA-E) polypeptide” is meant a protein having at least about 85% amino acid sequence identity to NCBI Accession No. NP_005507.3, or a fragment thereof having immunomodulatory activity. An exemplary amino acid sequence is provided below.

(SEQ ID NO: 472)
MVDGTLLLLLSEALALTQTWAGSHSLKYFHTSVSRPGRGEPRFISVGYVD
DTQFVRFDNDAASPRMVPRAPWMEQEGSEYWDRETRSARDTAQIFRVNLR
TLRGYYNQSEAGSHTLQWMHGCELGPDGRFLRGYEQFAYDGKDYLTLNED
LRSWTAVDTAAQISEQKSNDASEAEHQRAYLEDTCVEWLHKYLEKGKETL
LHLEPPKTHVTHHPISDHEATLRCWALGFYPAEITLTWQQDGEGHTQDTE
LVETRPAGDGTFQKWAAVVVPSGEEQRYTCHVQHEGLPEPVTLRWKPASQ
PTIPIVGIIAGLVLLGSVVSGAVVAAVIWRKKSSGGKGGSYSKAEWSDSA
QGSESHISL.

[0113] By “Human Leukocyte Antigen-E (HLA-E) polynucleotide” is meant a nucleic acid molecule encoding an HLA-E polypeptide, as well as the introns, exons, 3′ untranslated regions, 5′ untranslated regions, and regulatory sequences associated with its expression, or fragments thereof. An exemplary HLA-E polynucleotide is provided at NCBI Accession No. NM_005516.6, which is provided below.

(SEQ ID NO: 473)
CTCAGGACTCAGAGGCTGGGATCATGGTAGATGGAACCCTCCTTTTACTC
CTCTCGGAGGCCCTGGCCCTTACCCAGACCTGGGCGGGCTCCCACTCCTT
GAAGTATTTCCACACTTCCGTGTCCCGGCCCGGCCGCGGGGAGCCCCGCT
TCATCTCTGTGGGCTACGTGGACGACACCCAGTTCGTGCGCTTCGACAAC
GACGCCGCGAGTCCGAGGATGGTGCCGCGGGCGCCGTGGATGGAGCAGGA
GGGGTCAGAGTATTGGGACCGGGAGACACGGAGCGCCAGGGACACCGCAC
AGATTTTCCGAGTGAATCTGCGGACGCTGCGCGGCTACTACAATCAGAGC
GAGGCCGGGTCTCACACCCTGCAGTGGATGCATGGCTGCGAGCTGGGGCC
CGACGGGCGCTTCCTCCGCGGGTATGAACAGTTCGCCTACGACGGCAAGG
ATTATCTCACCCTGAATGAGGACCTGCGCTCCTGGACCGCGGTGGACACG
GCGGCTCAGATCTCCGAGCAAAAGTCAAATGATGCCTCTGAGGCGGAGCA
CCAGAGAGCCTACCTGGAAGACACATGCGTGGAGTGGCTCCACAAATACC
TGGAGAAGGGGAAGGAGACGCTGCTTCACCTGGAGCCCCCAAAGACACAC
GTGACTCACCACCCCATCTCTGACCATGAGGCCACCCTGAGGTGCTGGGC
CCTGGGCTTCTACCCTGCGGAGATCACACTGACCTGGCAGCAGGATGGGG
AGGGCCATACCCAGGACACGGAGCTCGTGGAGACCAGGCCTGCAGGGGAT
GGAACCTTCCAGAAGTGGGCAGCTGTGGTGGTGCCTTCTGGAGAGGAGCA
GAGATACACGTGCCATGTGCAGCATGAGGGGCTACCCGAGCCCGTCACCC
TGAGATGGAAGCCGGCTTCCCAGCCCACCATCCCCATCGTGGGCATCATT
GCTGGCCTGGTTCTCCTTGGATCTGTGGTCTCTGGAGCTGTGGTTGCTGC
TGTGATATGGAGGAAGAAGAGCTCAGGTGGAAAAGGAGGGAGCTACTCTA
AGGCTGAGTGGAGCGACAGTGCCCAGGGGTCTGAGTCTCACAGCTTGTAA
AGCCTGAGACAGCTGCCTTGTGTGCGACTGAGATGCACAGCTGCCTTGTG
TGCGACTGAGATGCAGGATTTCCTCACGCCTCCCCTATGTGTCTTAGGGG
ACTCTGGCTTCTCTTTTTGCAAGGGCCTCTGAATCTGTCTGTGTCCCTGT
TAGCACAATGTGAGGAGGTAGAGAAACAGTCCACCTCTGTGTCTACCATG
ACCCCCTTCCTCACACTGACCTGTGTTCCTTCCCTGTTCTCTTTTCTATT
AAAAATAAGAACCTGGGCAGAGTGCGGCAGCTCATGCCTGTAATCCCAGC
ACTTAGGGAGGCCGAGGAGGGCAGATCACGAGGTCAGGAGATCGAAACCA
TCCTGGCTAACACGGTGAAACCCCGTCTCTACTAAAAAATACAAAAAATT
AGCTGGGCGCAGAGGCACGGGCCTGTAGTCCCAGCTACTCAGGAGGCGGA
GGCAGGAGAATGGCGTCAACCCGGGAGGCGGAGGTTGCAGTGAGCCAGGA
TTGTGCGACTGCACTCCAGCCTGGGTGACAGGGTGAAACGCCATCTCAAA
AAATAAAAATTGAAAAATAAAAAAAGAACCTGGATCTCAATTTAATTTTT
CATATTCTTGCAATGAAATGGACTTGAGGAAGCTAAGATCATAGCTAGAA
ATACAGATAATTCCACAGCACATCTCTAGCAAATTTAGCCTATTCCTATT
CTCTAGCCTATTCCTTACCACCTGTAATCTTGACCATATACCTTGGAGTT
GAATATTGTTTTCATACTGCTGTGGTTTGAATGTTCCCTCCAACACTCAT
GTTGAGACTTAATCCCTAATGTGGCAATACTGAAAGGTGGGGCCTTTGAG
ATGTGATTGGATCGTAAGGCTGTGCCTTCATTCATGGGTTAATGGATTAA
TGGGTTATCACAGGAATGGGACTGGTGGCTTTATAAGAAGAGGAAAAGAG
AACTGAGCTAGCATGCCCAGCCCACAGAGAGCCTCCACTAGAGTGATGCT
AAGTGGAAATGTGAGGTGCAGCTGCCACAGAGGGCCCCCACCAGGGAAAT
GTCTAGTGTCTAGTGGATCCAGGCCACAGGAGAGAGTGCCTTGTGGAGCG
CTGGGAGCAGGACCTGACCACCACCAGGACCCCAGAACTGTGGAGTCAGT
GGCAGCATGCAGCGCCCCCTTGGGAAAGCTTTAGGCACCAGCCTGCAACC
CATTCGAGCAGCCACGTAGGCTGCACCCAGCAAAGCCACAGGCACGGGGC
TACCTGAGGCCTTGGGGGCCCAATCCCTGCTCCAGTGTGTCCGTGAGGCA
GCACACGAAGTCAAAAGAGATTATTCTCTTCCCACAGATACCTTTTCTCT
CCCATGACCCTTTAACAGCATCTGCTTCATTCCCCTCACCTTCCCAGGCT
GATCTGAGGTAAACTTTGAAGTAAAATAAAAGCTGTGTTTGAGCATCA
The HLA-E gene corresponds to Ensembl:
ENSG00000116815.

[0114] By “Human Leukocyte Antigen-G (HLA-G) polypeptide” is meant a protein having at least about 85% amino acid sequence identity to NCBI Accession No. NP_001350496.1, which is provided below, or a fragment thereof having immunomodulatory activity.

(SEQ ID NO: 474)
MKTPRMVVMAPRTLFLLLSGALTLTETWAGSHSMRYFSAAVSRPGRGEPR
FIAMGYVDDTQFVRFDSDSACPRMEPRAPWVEQEGPEYWEEETRNTKAHA
QTDRMNLQTLRGYYNQSEASSHTLQWMIGCDLGSDGRLLRGYEQYAYDGK
DYLALNEDLRSWTAADTAAQISKRKCEAANVAEQRRAYLEGTCVEWLHRY
LENGKEMLQRADPPKTHVTHHPVFDYEATLRCWALGFYPAEIILTWQRDG
EDQTQDVELVETRPAGDGTFQKWAAVVVPSGEEQRYTCHVQHEGLPEPLM
LRWKQSSLPTIPIMGIVAGLVVLAAVVTGAAVAAVLWRKKSSD.

[0115] By “Human Leukocyte Antigen-G (HLA-G) polynucleotide” is meant a nucleic acid molecule encoding an HLA-G polypeptide, as well as the introns, exons, 3′ untranslated regions, 5′ untranslated regions, and regulatory sequences associated with its expression, or fragments thereof. An exemplary HLA-G polynucleotide is provided at NCBI Accession No. NM_001363567.2, which is provided below.

(SEQ ID NO: 475)
ATATAGTAACATAGTGTGGTACTTTGTCTTGAGGAGATGTCCTGGACTCA
CACGGAAACTTAGGGCTACGGAATGAAGACGCCAAGGATGGTGGTCATGG
CGCCCCGAACCCTCTTCCTGCTGCTCTCGGGGGCCCTGACCCTGACCGAG
ACCTGGGCGGGCTCCCACTCCATGAGGTATTTCAGCGCCGCCGTGTCCCG
GCCCGGCCGCGGGGAGCCCCGCTTCATCGCCATGGGCTACGTGGACGACA
CGCAGTTCGTGCGGTTCGACAGCGACTCGGCGTGTCCGAGGATGGAGCCG
CGGGCGCCGTGGGTGGAGCAGGAGGGGCCGGAGTATTGGGAAGAGGAGAC
ACGGAACACCAAGGCCCACGCACAGACTGACAGAATGAACCTGCAGACCC
TGCGCGGCTACTACAACCAGAGCGAGGCCAGTTCTCACACCCTCCAGTGG
ATGATTGGCTGCGACCTGGGGTCCGACGGACGCCTCCTCCGCGGGTATGA
ACAGTATGCCTACGATGGCAAGGATTACCTCGCCCTGAACGAGGACCTGC
GCTCCTGGACCGCAGCGGACACTGCGGCTCAGATCTCCAAGCGCAAGTGT
GAGGCGGCCAATGTGGCTGAACAAAGGAGAGCCTACCTGGAGGGCACGTG
CGTGGAGTGGCTCCACAGATACCTGGAGAACGGGAAGGAGATGCTGCAGC
GCGCGGACCCCCCCAAGACACACGTGACCCACCACCCTGTCTTTGACTAT
GAGGCCACCCTGAGGTGCTGGGCCCTGGGCTTCTACCCTGCGGAGATCAT
ACTGACCTGGCAGCGGGATGGGGAGGACCAGACCCAGGACGTGGAGCTCG
TGGAGACCAGGCCTGCAGGGGATGGAACCTTCCAGAAGTGGGCAGCTGTG
GTGGTGCCTTCTGGAGAGGAGCAGAGATACACGTGCCATGTGCAGCATGA
GGGGCTGCCGGAGCCCCTCATGCTGAGATGGAAGCAGTCTTCCCTGCCCA
CCATCCCCATCATGGGTATCGTTGCTGGCCTGGTTGTCCTTGCAGCTGTA
GTCACTGGAGCTGCGGTCGCTGCTGTGCTGTGGAGAAAGAAGAGCTCAGA
TTGAAAAGGAGGGAGCTACTCTCAGGCTGCAATGTGAAACAGCTGCCCTG
TGTGGGACTGAGTGGCAAGTCCCTTTGTGACTTCAAGAACCCTGACTCCT
CTTTGTGCAGAGACCAGCCCACCCCTGTGCCCACCATGACCCTCTTCCTC
ATGCTGAACTGCATTCCTTCCCCAATCACCTTTCCTGTTCCAGAAAAGGG
GCTGGGATGTCTCCGTCTCTGTCTCAAATTTGTGGTCCACTGAGCTATAA
CTTACTTCTGTATTAAAATTAGAATCTGAGTATAAA.
The HLA-G gene corresponds to ENSG00000230413,
ENSG00000233095, ENSG00000237216, ENSG00000276051
and ENSG00000204632.

[0116] “Hybridization” means hydrogen bonding, which may be Watson-Crick, Hoogsteen or reversed Hoogsteen hydrogen bonding, between complementary nucleobases. For example, adenine and thymine are complementary nucleobases that pair through the formation of hydrogen bonds.

[0117] By “hypoxia” is meant a condition in which there is an oxygen deficiency that affects a cell, tissue, or biologic environment. In embodiments, the environment is a solid tumor microenvironment.

[0118] By “Hypoxia-Inducible Factor 1-alpha (HIF1a) polypeptide” is meant a protein having at least about 85% amino acid sequence identity to NCBI Accession No. NP_001521.1 or a fragment thereof, and having transcriptional regulatory and/or DNA binding activity. An exemplary amino acid sequence is provided below.

| (SEQ ID NO: 376) | |
|---|---|
| 1 | MEGAGGANDK KKISSERRKE KSRDAARSRR SKESEVFYEL AHQLPLPHNV SSHLDKASVM |
| 61 | RLTISYLRVR KLLDAGDLDI EDDMKAQMNC FYLKALDGFV MVLTDDGDMI YISDNVNKYM |
| 121 | GLTQFELTGH SVFDFTHPCD HEEMREMLTH RNGLVKKGKE QNTQRSFFLR MKCTLTSRGR |
| 181 | TMNIKSATWK VLHCTGHIHV YDTNSNQPQC GYKKPPMTCL VLICEPIPHP SNIEIPLDSK |
| 241 | TFLSRHSLDM KFSYCDERIT ELMGYEPEEL LGRSIYEYYH ALDSDHLTKT HHDMFTKGQV |
| 301 | TTGQYRMLAK RGGYVWVETQ ATVIYNTKNS QPQCIVCVNY VVSGIIQHDL IFSLQQTECV |
| 361 | LKPVESSDMK MTQLFTKVES EDTSSLFDKL KKEPDALTLL APAAGDTIIS LDFGSNDTET |
| 421 | DDQQLEEVPL YNDVMLPSPN EKLQNINLAM SPLPTAETPK PLRSSADPAL NQEVALKLEP |
| 481 | NPESLELSFT MPQIQDQTPS PSDGSTRQSS PEPNSPSEYC FYVDSDMVNE FKLELVEKLF |
| 541 | AEDTEAKNPF STQDTDLDLE MLAPYIPMDD DFQLRSFDQL SPLESSSASP ESASPQSTVT |
| 601 | VFQQTQIQEP TANATTTTAT TDELKTVTKD RMEDIKILIA SPSPTHIHKE TTSATSSPYR |
| 661 | DTQSRTASPN RAGKGVIEQT EKSHPRSPNV LSVALSQRTT VPEEELNPKI LALQNAQRKR |
| 721 | KMEHDGSLFQ AVGIGTLLQQ PDDHAATTSL SWKRVKGCKS SEQNGMEQKT IILIPSDLAC |
| 781 | RLLGQSMDES GLPQLTSYDC EVNAPIQGSR NLLQGEELLR ALDQVN |

In embodiments, the alpha subunit of transcription factor hypoxia-inducible factor-1 (HIF-1) polypeptide is a heterodimer composed of an alpha and a beta subunit. HIF-1 functions as a master regulator of cellular and systemic homeostatic response to hypoxia by activating transcription of many genes, including those involved in energy metabolism, angiogenesis, apoptosis, and other genes whose protein products increase oxygen delivery or facilitate metabolic adaptation to hypoxia. HIF-1 plays an important role in tumor angiogenesis.

[0119] By “Hypoxia-Inducible Factor 1-alpha (HIF1α) polynucleotide” is meant a nucleic acid encoding an HIF1α polypeptide. An exemplary HIF1α polynucleotide is provided at NCBI Accession No. NM_001530.4. An exemplary nucleic acid sequence is provided below.

| (SEQ ID NO: 378) | |
|---|---|
| 1 | AGTGCACAGT GCTGCCTCGT CTGAGGGGAC AGGAGGATCA CCCTCTTCGT CGCTTCGGCC |
| 61 | AGTGTGTCGG GCTGGGCCCT GACAAGCCAC CTGAGGAGAG GCTCGGAGCC GGGCCCGGAC |
| 121 | CCCGGCGATT GCCGCCCGCT TCTCTCTAGT CTCACGAGGG GTTTCCCGCC TCGCACCCCC |
| 181 | ACCTCTGGAC TTGCCTTTCC TTCTCTTCTC CGCGTGTGGA GGGAGCCAGC GCTTAGGCCG |
| 241 | GAGCGAGCCT GGGGGCCGCC CGCCGTGAAG ACATCGCGGG GACCGATTCA CCATGGAGGG |
| 301 | CGCCGGCGGC GCGAACGACA AGAAAAAGAT AAGTTCTGAA CGTCGAAAAG AAAAGTCTCG |
| 361 | AGATGCAGCC AGATCTCGGC GAAGTAAAGA ATCTGAAGTT TTTTATGAGC TTGCTCATCA |
| 421 | GTTGCCACTT CCACATAATG TGAGTTCGCA TCTTGATAAG GCCTCTGTGA TGAGGCTTAC |
| 481 | CATCAGCTAT TTGCGTGTGA GGAAACTTCT GGATGCTGGT GATTTGGATA TTGAAGATGA |
| 541 | CATGAAAGCA CAGATGAATT GCTTTTATTT GAAAGCCTTG GATGGTTTTG TTATGGTTCT |
| 601 | CACAGATGAT GGTGACATGA TTTACATTTC TGATAATGTG AACAAATACA TGGGATTAAC |
| 661 | TCAGTTTGAA CTAACTGGAC ACAGTGTGTT TGATTTTACT CATCCATGTG ACCATGAGGA |
| 721 | AATGAGAGAA ATGCTTACAC ACAGAAATGG CCTTGTGAAA AAGGGTAAAG AACAAAACAC |
| 781 | ACAGCGAAGC TTTTTTCTCA GAATGAAGTG TACCCTAACT AGCCGAGGAA GAACTATGAA |
| 841 | CATAAAGTCT GCAACATGGA AGGTATTGCA CTGCACAGGC CACATTCACG TATATGATAC |
| 901 | CAACAGTAAC CAACCTCAGT GTGGGTATAA GAAACCACCT ATGACCTGCT TGGTGCTGAT |
| 961 | TTGTGAACCC ATTCCTCACC CATCAAATAT TGAAATTCCT TTAGATAGCA AGACTTTCCT |
| 1021 | CAGTCGACAC AGCCTGGATA TGAAATTTTC TTATTGTGAT GAAAGAATTA CCGAATTGAT |
| 1081 | GGGATATGAG CCAGAAGAAC TTTTAGGCCG CTCAATTTAT GAATATTATC ATGCTTTGGA |
| 1141 | CTCTGATCAT CTGACCAAAA CTCATCATGA TATGTTTACT AAAGGACAAG TCACCACAGG |
| 1201 | ACAGTACAGG ATGCTTGCCA AAAGAGGTGG ATATGTCTGG GTTGAAACTC AAGCAACTGT |
| 1261 | CATATATAAC ACCAAGAATT CTCAACCACA GTGCATTGTA TGTGTGAATT ACGTTGTGAG |
| 1321 | TGGTATTATT CAGCACGACT TGATTTTCTC CCTTCAACAA ACAGAATGTG TCCTTAAACC |
| 1381 | GGTTGAATCT TCAGATATGA AAATGACTCA GCTATTCACC AAAGTTGAAT CAGAAGATAC |
| 1441 | AAGTAGCCTC TTTGACAAAC TTAAGAAGGA ACCTGATGCT TTAACTTTGC TGGCCCCAGC |
| 1501 | CGCTGGAGAC ACAATCATAT CTTTAGATTT TGGCAGCAAC GACACAGAAA CTGATGACCA |
| 1561 | GCAACTTGAG GAAGTACCAT TATATAATGA TGTAATGCTC CCCTCACCCA ACGAAAAATT |
| 1621 | ACAGAATATA AATTTGGCAA TGTCTCCATT ACCCACCGCT GAAACGCCAA AGCCACTTCG |
| 1681 | AAGTAGTGCT GACCCTGCAC TCAATCAAGA AGTTGCATTA AAATTAGAAC CAAATCCAGA |
| 1741 | GTCACTGGAA CTTTCTTTTA CCATGCCCCA GATTCAGGAT CAGACACCTA GTCCTTCCGA |
| 1801 | TGGAAGCACT AGACAAAGTT CACCTGAGCC TAATAGTCCC AGTGAATATT GTTTTTATGT |
| 1861 | GGATAGTGAT ATGGTCAATG AATTCAAGTT GGAATTGGTA GAAAAACTTT TTGCTGAAGA |
| 1921 | CACAGAAGCA AAGAACCCAT TTTCTACTCA GGACACAGAT TTAGACTTGG AGATGTTAGC |
| 1981 | TCCCTATATC CCAATGGATG ATGACTTCCA GTTACGTTCC TTCGATCAGT TGTCACCATT |
| 2041 | AGAAAGCAGT TCCGCAAGCC CTGAAAGCGC AAGTCCTCAA AGCACAGTTA CAGTATTCCA |
| 2101 | GCAGACTCAA ATACAAGAAC CTACTGCTAA TGCCACCACT ACCACTGCCA CCACTGATGA |
| 2161 | ATTAAAAACA GTGACAAAAG ACCGTATGGA AGACATTAAA ATATTGATTG CATCTCCATC |
| 2221 | TCCTACCCAC ATACATAAAG AAACTACTAG TGCCACATCA TCACCATATA GAGATACTCA |
| 2281 | AAGTCGGACA GCCTCACCAA ACAGAGCAGG AAAAGGAGTC ATAGAACAGA CAGAAAAATC |
| 2341 | TCATCCAAGA AGCCCTAACG TGTTATCTGT CGCTTTGAGT CAAAGAACTA CAGTTCCTGA |
| 2401 | GGAAGAACTA AATCCAAAGA TACTAGCTTT GCAGAATGCT CAGAGAAAGC GAAAAATGGA |
| 2461 | ACATGATGGT TCACTTTTTC AAGCAGTAGG AATTGGAACA TTATTACAGC AGCCAGACGA |
| 2521 | TCATGCAGCT ACTACATCAC TTTCTTGGAA ACGTGTAAAA GGATGCAAAT CTAGTGAACA |
| 2581 | GAATGGAATG GAGCAAAAGA CAATTATTTT AATACCCTCT GATTTAGCAT GTAGACTGCT |
| 2641 | GGGGCAATCA ATGGATGAAA GTGGATTACC ACAGCTGACC AGTTATGATT GTGAAGTTAA |
| 2701 | TGCTCCTATA CAAGGCAGCA GAAACCTACT GCAGGGTGAA GAATTACTCA GAGCTTTGGA |
| 2761 | TCAAGTTAAC TGAGCTTTTT CTTAATTTCA TTCCTTTTTT TGGACACTGG TGGCTCATTA |
| 2821 | CCTAAAGCAG TCTATTTATA TTTTCTACAT CTAATTTTAG AAGCCTGGCT ACAATACTGC |
| 2881 | ACAAACTTGG TTAGTTCAAT TTTGATCCCC TTTCTACTTA ATTTACATTA ATGCTCTTTT |
| 2941 | TTAGTATGTT CTTTAATGCT GGATCACAGA CAGCTCATTT TCTCAGTTTT TTGGTATTTA |
| 3001 | AACCATTGCA TTGCAGTAGC ATCATTTTAA AAAATGCACC TTTTTATTTA TTTATTTTTG |
| 3061 | GCTAGGGAGT TTATCCCTTT TTCGAATTAT TTTTAAGAAG ATGCCAATAT AATTTTTGTA |
| 3121 | AGAAGGCAGT AACCTTTCAT CATGATCATA GGCAGTTGAA AAATTTTTAC ACCTTTTTTT |
| 3181 | TCACATTTTA CATAAATAAT AATGCTTTGC CAGCAGTACG TGGTAGCCAC AATTGCACAA |
| 3241 | TATATTTTCT TAAAAAATAC CAGCAGTTAC TCATGGAATA TATTCTGCGT TTATAAAACT |
| 3301 | AGTTTTTAAG AAGAAATTTT TTTTGGCCTA TGAAATTGTT AAACCTGGAA CATGACATTG |
| 3361 | TTAATCATAT AATAATGATT CTTAAATGCT GTATGGTTTA TTATTTAAAT GGGTAAAGCC |
| 3421 | ATTTACATAA TATAGAAAGA TATGCATATA TCTAGAAGGT ATGTGGCATT TATTTGGATA |
| 3481 | AAATTCTCAA TTCAGAGAAA TCATCTGATG TTTCTATAGT CACTTTGCCA GCTCAAAAGA |
| 3541 | AAACAATACC CTATGTAGTT GTGGAAGTTT ATGCTAATAT TGTGTAACTG ATATTAAACC |
| 3601 | TAAATGTTCT GCCTACCCTG TTGGTATAAA GATATTTTGA GCAGACTGTA AACAAGAAAA |
| 3661 | AAAAAATCAT GCATTCTTAG CAAAATTGCC TAGTATGTTA ATTTGCTCAA AATACAATGT |
| 3721 | TTGATTTTAT GCACTTTGTC GCTATTAACA TCCTTTTTTT CATGTAGATT TCAATAATTG |
| 3781 | AGTAATTTTA GAAGCATTAT TTTAGGAATA TATAGTTGTC ACAGTAAATA TCTTGTTTTT |
| 3841 | TCTATGTACA TTGTACAAAT TTTTCATTCC TTTTGCTCTT TGTGGTTGGA TCTAACACTA |
| 3901 | ACTGTATTGT TTTGTTACAT CAAATAAACA TCTTCTGTGG ACCAGG |

[0120] By “Hypoxia-Inducible Factor 1-alpha isoform I.3 (HIF1α.I3) polypeptide” is meant a protein having at least about 85% amino acid sequence identity to Genbank Accession No. ACN88547.1 or a fragment thereof, and having transcriptional regulatory and/or DNA binding activity. An exemplary amino acid sequence is provided below.

| (SEQ ID NO: 379) | |
|---|---|
| 1 | MSSQCRSLEN KFVFLKEGLG NSKPEELEEI RIENGRISSE RRKEKSRDAA RSRRSKESEV |
| 61 | FYELAHQLPL PHNVSSHLDK ASVMRLTISY LRVRKLLDAG DLDIEDDMKA QMNCFYLKAL |
| 121 | DGFVMVLTDD GDMIYISDNV NKYMGLTQFE LTGHSVFDFT HPCDHEEMRE MLTHRNGLVK |
| 181 | KGKEQNTQRS FFLRMKCTLT SRGRTMNIKS ATWKVLHCTG HIHVYDTNSN QPQCGYKKPP |
| 241 | MTCLVLICEP IPHPSNIEIP LDSKTFLSRH SLDMKFSYCD ERITELMGYE PEELLGRSIY |
| 301 | EYYHALDSDH LTKTHHDMFT KGQVTTGQYR MLAKRGGYVW VETQATVIYN TKNSQPQCIV |
| 361 | CVNYVVSGII QHDLIFSLQQ TECVLKPVES SDMKMTQLFT KVESEDTSSL FDKLKKEPDA |
| 421 | LTLLAPAAGD TIISLDFGSN DTETDDQQLE EVPLYNDVML PSPNEKLQNI NLAMSPLPTA |
| 481 | ETPKPLRSSA DPALNQEVAL KLEPNPESLE LSFTMPQIQD QTPSPSDGST RQSSPEPNSP |
| 541 | SEYCFYVDSD MVNEFKLELV EKLFAEDTEA KNPFSTQDTD LDLEMLAPYI PMDDDFQLRS |
| 601 | FDQLSPLESS SASPESASPQ STVTVFQQTQ IQEPTANATT TTATTDELKT VTKDRMEDIK |
| 661 | ILIASPSPTH IHKETTSATS SPYRDTQSRT ASPNRAGKGV IEQTEKSHPR SPNVLSVALS |
| 721 | QRTTVPEEEL NPKILALQNA QRKRKMEHDG SLFQAVGIGT LLQQPDDHAA TTSLSWKRVK |
| 781 | GCKSSEQNGM EQKTIILIPS DLACRLLGQS MDESGLPQLT SYDCEVNAPI QGSRNLLQGE |
| 841 | ELLRALDQVN |

[0121] By “Hypoxia-Inducible Factor 1-alpha isoform I.3 (HIF1α.I3) polynucleotide,” “HIF-1α isoform 3,” or “HIF1,3” is meant a nucleic acid encoding an HIF1α.I3 polypeptide. An exemplary HIF1α.I3 polynucleotide is provided at Genbank Accession No. FJ790247.1, which is reproduced below:

| (SEQ ID NO: 380) | |
|---|---|
| 1 | ATTTGAAAAC TTGGCAACCT TGGATTGGAT GGATTCATAT TTCTTAGTAT AGAAGTTCTT |
| 61 | GATATAACTG AAAAATTAAG TTAAACACTT AATAAGTGGT GGTTACTCAG CACTTTTAGA |
| 121 | TGCTGTTTAT AATAGATGAC CTTTTCTAAC TAATTTACAG TTTTTTGAAA GATAACTGAG |
| 181 | AGGTTGAGGG ACGGAGATTT TCTTCAAGCA ATTTTTTTTT TTCATTTTAA ATGAGCTCCC |
| 241 | AATGTCGGAG TTTGGAAAAC AAATTTGTCT TTTTAAAAGA AGGTCTAGGA AACTCAAAAC |
| 301 | CTGAAGAATT GGAAGAAATC AGAATAGAAA ATGGTAGGAT AAGTTCTGAA CGTCGAAAAG |
| 361 | AAAAGTCTCG AGATGCAGCC AGATCTCGGC GAAGTAAAGA ATCTGAAGTT TTTTATGAGC |
| 421 | TTGCTCATCA GTTGCCACTT CCACATAATG TGAGTTCGCA TCTTGATAAG GCCTCTGTGA |
| 481 | TGAGGCTTAC CATCAGCTAT TTGCGTGTGA GGAAACTTCT GGATGCTGGT GATTTGGATA |
| 541 | TTGAAGATGA CATGAAAGCA CAGATGAATT GCTTTTATTT GAAAGCCTTG GATGGTTTTG |
| 601 | TTATGGTTCT CACAGATGAT GGTGACATGA TTTACATTTC TGATAATGTG AACAAATACA |
| 661 | TGGGATTAAC TCAGTTTGAA CTAACTGGAC ACAGTGTGTT TGATTTTACT CATCCATGTG |
| 721 | ACCATGAGGA AATGAGAGAA ATGCTTACAC ACAGAAATGG CCTTGTGAAA AAGGGTAAAG |
| 781 | AACAAAACAC ACAGCGAAGC TTTTTTCTCA GAATGAAGTG TACCCTAACT AGCCGAGGAA |
| 841 | GAACTATGAA CATAAAGTCT GCAACATGGA AGGTATTGCA CTGCACAGGC CACATTCACG |
| 901 | TATATGATAC CAACAGTAAC CAACCTCAGT GTGGGTATAA GAAACCACCT ATGACCTGCT |
| 961 | TGGTGCTGAT TTGTGAACCC ATTCCTCACC CATCAAATAT TGAAATTCCT TTAGATAGCA |
| 1021 | AGACTTTCCT CAGTCGACAC AGCCTGGATA TGAAATTTTC TTATTGTGAT GAAAGAATTA |
| 1081 | CCGAATTGAT GGGATATGAG CCAGAAGAAC TTTTAGGCCG CTCAATTTAT GAATATTATC |
| 1141 | ATGCTTTGGA CTCTGATCAT CTGACCAAAA CTCATCATGA TATGTTTACT AAAGGACAAG |
| 1201 | TCACCACAGG ACAGTACAGG ATGCTTGCCA AAAGAGGTGG ATATGTCTGG GTTGAAACTC |
| 1261 | AAGCAACTGT CATATATAAC ACCAAGAATT CTCAACCACA GTGCATTGTA TGTGTGAATT |
| 1321 | ACGTTGTGAG TGGTATTATT CAGCACGACT TGATTTTCTC CCTTCAACAA ACAGAATGTG |
| 1381 | TCCTTAAACC GGTTGAATCT TCAGATATGA AAATGACTCA GCTATTCACC AAAGTTGAAT |
| 1441 | CAGAAGATAC AAGTAGCCTC TTTGACAAAC TTAAGAAGGA ACCTGATGCT TTAACTTTGC |
| 1501 | TGGCCCCAGC CGCTGGAGAC ACAATCATAT CTTTAGATTT TGGCAGCAAC GACACAGAAA |
| 1561 | CTGATGACCA GCAACTTGAG GAAGTACCAT TATATAATGA TGTAATGCTC CCCTCACCCA |
| 1621 | ACGAAAAATT ACAGAATATA AATTTGGCAA TGTCTCCATT ACCCACCGCT GAAACGCCAA |
| 1681 | AGCCACTTCG AAGTAGTGCT GACCCTGCAC TCAATCAAGA AGTTGCATTA AAATTAGAAC |
| 1741 | CAAATCCAGA GTCACTGGAA CTTTCTTTTA CCATGCCCCA GATTCAGGAT CAGACACCTA |
| 1801 | GTCCTTCCGA TGGAAGCACT AGACAAAGTT CACCTGAGCC TAATAGTCCC AGTGAATATT |
| 1861 | GTTTTTATGT GGATAGTGAT ATGGTCAATG AATTCAAGTT GGAATTGGTA GAAAAACTTT |
| 1921 | TTGCTGAAGA CACAGAAGCA AAGAACCCAT TTTCTACTCA GGACACAGAT TTAGACTTGG |
| 1981 | AGATGTTAGC TCCCTATATC CCAATGGATG ATGACTTCCA GTTACGTTCC TTCGATCAGT |
| 2041 | TGTCACCATT AGAAAGCAGT TCCGCAAGCC CTGAAAGCGC AAGTCCTCAA AGCACAGTTA |
| 2101 | CAGTATTCCA GCAGACTCAA ATACAAGAAC CTACTGCTAA TGCCACCACT ACCACTGCCA |
| 2161 | CCACTGATGA ATTAAAAACA GTGACAAAAG ACCGTATGGA AGACATTAAA ATATTGATTG |
| 2221 | CATCTCCATC TCCTACCCAC ATACATAAAG AAACTACTAG TGCCACATCA TCACCATATA |
| 2281 | GAGATACTCA AAGTCGGACA GCCTCACCAA ACAGAGCAGG AAAAGGAGTC ATAGAACAGA |
| 2341 | CAGAAAAATC TCATCCAAGA AGCCCTAACG TGTTATCTGT CGCTTTGAGT CAAAGAACTA |
| 2401 | CAGTTCCTGA GGAAGAACTA AATCCAAAGA TACTAGCTTT GCAGAATGCT CAGAGAAAGC |
| 2461 | GAAAAATGGA ACATGATGGT TCACTTTTTC AAGCAGTAGG AATTGGAACA TTATTACAGC |
| 2521 | AGCCAGACGA TCATGCAGCT ACTACATCAC TTTCTTGGAA ACGTGTAAAA GGATGCAAAT |
| 2581 | CTAGTGAACA GAATGGAATG GAGCAAAAGA CAATTATTTT AATACCCTCT GATTTAGCAT |
| 2641 | GTAGACTGCT GGGGCAATCA ATGGATGAAA GTGGATTACC ACAGCTGACC AGTTATGATT |
| 2701 | GTGAAGTTAA TGCTCCTATA CAAGGCAGCA GAAACCTACT GCAGGGTGAA GAATTACTCA |
| 2761 | GAGCTTTGGA TCAAGTTAAC TGAGCTTTTT CTTAATTTCA TTCCTTTTTT TGGACACTGG |
| 2821 | TGGCTCACTA CCTAAAGCAG TCTATTTATA TTTTCTACAT CTAATTTTAG AAGCCTGGCT |
| 2881 | ACAATACTGC ACAAACTTGG TTAGTTCAAT TTTTGATCCC CTTTCTACTT AATTTACATT |
| 2941 | AATGCTCTTT TTTAGTATGT TCTTTAATGC TGGATCACAG ACAGCTCATT TTCTCAGTTT |
| 3001 | TTTGGTATTT AAACCATTGC ATTGCAGTAG CATCATTTTA AAAAATGCAC CTTTTTATTT |
| 3061 | ATTTATTTTT GGCTAGGGAG TTTATCCCTT TTTCGAATTA TTTTTAAGAA GATGCCAATA |
| 3121 | TAATTTTTGT AAGAAGGCAG TAACCTTTCA TCATGATCAT AGGCAGTTGA AAAATTTTTA |
| 3181 | CACCTTTTTT TTCACATTTT ACATAAATAA TAATGCTTTG CCAGCAGTAC GTGGTAGCCA |
| 3241 | CAATTGCACA ATATATTTTC TTAAAAAATA CCAGCAGTTA CTCATGGAAT ATATTCTGCG |
| 3301 | TTTATAAAAC TAGTTTTTAA GAAGAAATTT TTTTTGGCCT ATGAAATTGT TAAACCTGGA |
| 3361 | ACATGACATT GTTAATCATA TAATAATGAT TCTTAAATGC TGTATGGTTT ATTATTTAAA |
| 3421 | TGGGTAAAGC CATTTACATA ATATAGAAAG ATATGCATAT ATCTAGAAGG |

[0122] By “immune cell” is meant a cell of the immune system capable of generating an immune response. Exemplary immune cells include, but are not limited to, T cells, macrophages, and NK cells.

[0123] By “increases” is meant a positive alteration of at least 10%, 25%, 50%, 75%, or 100%. In embodiments, an increase in cytokine production is measured as an increase relative to an unmodified reference immune cell in an immunosuppressive environment (e.g., a hypoxic environment, such as a solid tumor microenvironment (sTME)).

[0124] The terms “inhibitor of base repair”, “base repair inhibitor”, “IBR” or their grammatical equivalents refer to a protein that is capable in inhibiting the activity of a nucleic acid repair enzyme, for example a base excision repair enzyme.

[0125] An “intein” is a fragment of a protein that is able to excise itself and join the remaining fragments (the exteins) with a peptide bond in a process known as protein splicing.

[0126] The terms “isolated,” “purified,” or “biologically pure” refer to material that is free to varying degrees from components which normally accompany it as found in its native state. “Isolate” denotes a degree of separation from original source or surroundings. “Purify” denotes a degree of separation that is higher than isolation. A “purified” or “biologically pure” protein is sufficiently free of other materials such that any impurities do not materially affect the biological properties of the protein or cause other adverse consequences. That is, a nucleic acid or peptide of this invention is purified if it is substantially free of cellular material, viral material, or culture medium when produced by recombinant DNA techniques, or chemical precursors or other chemicals when chemically synthesized. Purity and homogeneity are typically determined using analytical chemistry techniques, for example, polyacrylamide gel electrophoresis or high performance liquid chromatography. The term “purified” can denote that a nucleic acid or protein gives rise to essentially one band in an electrophoretic gel. For a protein that can be subjected to modifications, for example, phosphorylation or glycosylation, different modifications may give rise to different isolated proteins, which can be separately purified.

[0127] By “isolated polynucleotide” is meant a nucleic acid (e.g., a DNA) that is free of the genes which, in the naturally-occurring genome of the organism from which the nucleic acid molecule of the invention is derived, flank the gene. The term therefore includes, for example, a recombinant DNA that is incorporated into a vector; into an autonomously replicating plasmid or virus; or into the genomic DNA of a prokaryote or eukaryote; or that exists as a separate molecule (for example, a cDNA or a genomic or cDNA fragment produced by PCR or restriction endonuclease digestion) independent of other sequences. In addition, the term includes an RNA molecule that is transcribed from a DNA molecule, as well as a recombinant DNA that is part of a hybrid gene encoding additional polypeptide sequence.

[0128] By an “isolated polypeptide” is meant a polypeptide of the invention that has been separated from components that naturally accompany it. Typically, the polypeptide is isolated when it is at least 60%, by weight, free from the proteins and naturally-occurring organic molecules with which it is naturally associated. Preferably, the preparation is at least 75%, more preferably at least 90%, and most preferably at least 99%, by weight, a polypeptide of the invention. An isolated polypeptide of the invention may be obtained, for example, by extraction from a natural source, by expression of a recombinant nucleic acid encoding such a polypeptide; or by chemically synthesizing the protein. Purity can be measured by any appropriate method, for example, column chromatography, polyacrylamide gel electrophoresis, or by HPLC analysis.

[0129] The term “linker”, as used herein, refers to a molecule that links two moieties. In some embodiments, a linker comprises amino acids, nucleic acids, or analogs thereof. In one embodiment, the term “linker” refers to a covalent linker (e.g., covalent bond) or a non-covalent linker.

[0130] By “lymphocyte activation gene 3 (LAG3) polypeptide” is meant a protein having at least about 85% amino acid sequence identity to GenBank Accession No. AAH52589.1, which is provided below, or a fragment thereof having immunomodulatory activity.
[0131] >AAH52589.1 LAG3 protein [Homo sapiens]

(SEQ ID NO: 476)
MWEAQFLGLLFLQPLWVAPVKPLQPGAEVPVVWAQEGAPAQLPCSPTIPL
QDLSLLRRAGVTWQHQPDSGPPAAAPGHPLAPGPHPAAPSSWGPRPRRYT
VLSVGPGGLRSGRLPLQPRVQLDERGRQRGDFSLWLRPARRADAGEYRAA
VHLRDRALSCRLRLRLGQASMTASPPGSLRASDWVILNCSFSRPDRPASV
HWFRNRGQGRVPVRESPHHHLAESFLFLPQVSPMDSGPWGCILTYRDGFN
VSIMYNLTVLGLEPPTPLTVYAGAGSRVGLPCRLPAGVGTRSFLTAKWTP
PGGGPDLLVTGDNGDFTLRLEDVSQAQAGTYTCHIHLQEQQLNATVTLAI
ITGQPQVGKE.

[0132] By “lymphocyte activation gene 3 (LAG3) polynucleotide” is meant a nucleic acid molecule encoding an x polypeptide, as well as the introns, exons, 3′ untranslated regions, 5′ untranslated regions, and regulatory sequences associated with its expression, or fragments thereof. An exemplary LAG3 polynucleotide sequence is provided at GenBank Accession No. BC052589.1:335-1417, which is provided below. An exemplary LAG3 polynucleotide sequence is also provided at Ensenbl accession no: ENSG00000089692.
[0133] >BC052589.1:335-1417 Homo sapiens lymphocyte-activation gene 3, mRNA (cDNA clone MGC:59698 IMAGE:6301931), complete cds

(SEQ ID NO: 477)
ATGTGGGAGGCTCAGTTCCTGGGCTTGCTGTTTCTGCAGCCGCTTTGGGT
GGCTCCAGTGAAGCCTCTCCAGCCAGGGGCTGAGGTCCCGGTGGTGTGGG
CCCAGGAGGGGGCTCCTGCCCAGCTCCCCTGCAGCCCCACAATCCCCCTC
CAGGATCTCAGCCTTCTGCGAAGAGCAGGGGTCACTTGGCAGCATCAGCC
AGACAGTGGCCCGCCCGCTGCCGCCCCCGGCCATCCCCTGGCCCCCGGCC
CTCACCCGGCGGCGCCCTCCTCCTGGGGGCCCAGGCCCCGCCGCTACACG
GTGCTGAGCGTGGGTCCCGGAGGCCTGCGCAGCGGGAGGCTGCCCCTGCA
GCCCCGCGTCCAGCTGGATGAGCGCGGCCGGCAGCGCGGGGACTTCTCGC
TATGGCTGCGCCCAGCCCGGCGCGCGGACGCCGGCGAGTACCGCGCCGCG
GTGCACCTCAGGGACCGCGCCCTCTCCTGCCGCCTCCGTCTGCGCCTGGG
CCAGGCCTCGATGACTGCCAGCCCCCCAGGATCTCTCAGAGCCTCCGACT
GGGTCATTTTGAACTGCTCCTTCAGCCGCCCTGACCGCCCAGCCTCTGTG
CATTGGTTCCGGAACCGGGGCCAGGGCCGAGTCCCTGTCCGGGAGTCCCC
CCATCACCACTTAGCGGAAAGCTTCCTCTTCCTGCCCCAAGTCAGCCCCA
TGGACTCTGGGCCCTGGGGCTGCATCCTCACCTACAGAGATGGCTTCAAC
GTCTCCATCATGTATAACCTCACTGTTCTGGGTCTGGAGCCCCCAACTCC
CTTGACAGTGTACGCTGGAGCAGGTTCCAGGGTGGGGCTGCCCTGCCGCC
TGCCTGCTGGTGTGGGGACCCGGTCTTTCCTCACTGCCAAGTGGACTCCT
CCTGGGGGAGGCCCTGACCTCCTGGTGACTGGAGACAATGGCGACTTTAC
CCTTCGACTAGAGGATGTGAGCCAGGCCCAGGCTGGGACCTACACCTGCC
ATATCCATCTGCAGGAACAGCAGCTCAATGCCACTGTCACATTGGCAATC
ATCACAGGTCAGCCTCAGGTGGGAAAGGAGTAG.

[0134] By “marker” is meant any protein or polynucleotide whose expression defines or is associated with a particular cell type or disease state. In some embodiments, a marker has an alteration in expression level or activity that is associated with a disease or disorder (e.g., solid tumor). In some cases, the marker is pCREB, which is suitable, for example, as a marker for expression of Hif1A and A2AR. pCREB is a secondary messenger downstream of A2AR. In some cases, a marker for A2AR or HIF is cytokine production, where higher levels of cytokine production indicate higher levels of A2AR or HIF (e.g., Hif1A) expression. Not intending to be bound by theory, when unedited cells are treated with adenosine, they utilize the A2AR signaling pathway and produce less cytokine. When cells edited to knock-out or reduce expression and/or activity of A2AR, the cells A2AR signaling is not activated and more cytokines are produced.

[0135] The term “mutation,” as used herein, refers to a substitution of a residue within a sequence, e.g., a nucleic acid or amino acid sequence, with another residue, or a deletion or insertion of one or more residues within a sequence. Mutations are typically described herein by identifying the original residue followed by the position of the residue within the sequence and by the identity of the newly substituted residue. Various methods for making the amino acid substitutions (mutations) provided herein are well known in the art, and are provided by, for example, Green and Sambrook, Molecular Cloning: A Laboratory Manual (4^{th} ed., Cold Spring Harbor Laboratory Press, Cold Spring Harbor, N.Y. (2012)).

[0136] The terms “nucleic acid” and “nucleic acid molecule,” as used herein, refers to a compound comprising a nucleobase and an acidic moiety, e.g., a nucleoside, a nucleotide, or a polymer of nucleotides. Typically, polymeric nucleic acids, e.g., nucleic acid molecules comprising three or more nucleotides are linear molecules, in which adjacent nucleotides are linked to each other via a phosphodiester linkage. In some embodiments, “nucleic acid” refers to individual nucleic acid residues (e.g. nucleotides and/or nucleosides). In some embodiments, “nucleic acid” refers to an oligonucleotide chain comprising three or more individual nucleotide residues. As used herein, the terms “oligonucleotide” and “polynucleotide” can be used interchangeably to refer to a polymer of nucleotides (e.g., a string of at least three nucleotides). In some embodiments, “nucleic acid” encompasses RNA as well as single and/or double-stranded DNA. Nucleic acids may be naturally occurring, for example, in the context of a genome, a transcript, an mRNA, tRNA, rRNA, siRNA, snRNA, a plasmid, cosmid, chromosome, chromatid, or other naturally occurring nucleic acid molecule. On the other hand, a nucleic acid molecule may be a non-naturally occurring molecule, e.g., a recombinant DNA or RNA, an artificial chromosome, an engineered genome, or fragment thereof, or a synthetic DNA, RNA, DNA/RNA hybrid, or including non-naturally occurring nucleotides or nucleosides. Furthermore, the terms “nucleic acid,” “DNA,” “RNA,” and/or similar terms include nucleic acid analogs, e.g., analogs having other than a phosphodiester backbone. Nucleic acids can be purified from natural sources, produced using recombinant expression systems and optionally purified, chemically synthesized, etc. Where appropriate, e.g., in the case of chemically synthesized molecules, nucleic acids can comprise nucleoside analogs such as analogs having chemically modified bases or sugars, and backbone modifications. A nucleic acid sequence is presented in the 5′ to 3′ direction unless otherwise indicated. In some embodiments, a nucleic acid is or comprises natural nucleosides (e.g. adenosine, thymidine, guanosine, cytidine, uridine, deoxyadenosine, deoxythymidine, deoxyguanosine, and deoxycytidine); nucleoside analogs (e.g., 2-aminoadenosine, 2-thiothymidine, inosine, pyrrolo-pyrimidine, 3-methyl adenosine, 5-methylcytidine, 2-aminoadenosine, C5-bromouridine, C5-fluorouridine, C5-iodouridine, C5-propynyl-uridine, C5-propynyl-cytidine, C5-methylcytidine, 2-aminoadenosine, 7-deazaadenosine, 7-deazaguanosine, 8-oxoadenosine, 8-oxoguanosine, 0(6)-methylguanine, and 2-thiocytidine); chemically modified bases; biologically modified bases (e.g., methylated bases); intercalated bases; modified sugars (2′—e.g., fluororibose, ribose, 2′-deoxyribose, arabinose, and hexose); and/or modified phosphate groups (e.g., phosphorothioates and 5′-N-phosphoramidite linkages).

[0137] The term “nuclear localization sequence,” “nuclear localization signal,” or “NLS” refers to an amino acid sequence that promotes import of a protein into the cell nucleus. Nuclear localization sequences are known in the art and described, for example, in Plank et al., International PCT application, PCT/EP2000/011690, filed Nov. 23, 2000, published as WO/2001/038547 on May 31, 2001, the contents of which are incorporated herein by reference for their disclosure of exemplary nuclear localization sequences. In other embodiments, the NLS is an optimized NLS described, for example, by Koblan et al., Nature Biotech. 2018 doi:10.1038/nbt.4172. In some embodiments, an NLS comprises the amino acid sequence

(SEQ ID NO: 190)
KRTADGSEFESPKKKRKV,
(SEQ ID NO: 191)
KRPAATKKAGQAKKKK,
(SEQ ID NO: 192)
KKTELQTTNAENKTKKL,
(SEQ ID NO: 193)
KRGINDRNFWRGENGRKTR,
(SEQ ID NO: 194)
RKSGKIAAIVVKRPRK,
(SEQ ID NO: 195)
PKKKRKV,
or
(SEQ ID NO: 196)
MDSLLMNRRKFLYQFKNVRWAKGRRETYLC.

[0138] The term “nucleobase,” “nitrogenous base,” or “base,” used interchangeably herein, refers to a nitrogen-containing biological compound that forms a nucleoside, which in turn is a component of a nucleotide. The ability of nucleobases to form base pairs and to stack one upon another leads directly to long-chain helical structures such as ribonucleic acid (RNA) and deoxyribonucleic acid (DNA). Five nucleobases—adenine (A), cytosine (C), guanine (G), thymine (T), and uracil (U)—are called primary or canonical. Adenine and guanine are derived from purine, and cytosine, uracil, and thymine are derived from pyrimidine. DNA and RNA can also contain other (non-primary) bases that are modified. Non-limiting exemplary modified nucleobases can include hypoxanthine, xanthine, 7-methylguanine, 5,6-dihydrouracil, 5-methylcytosine (m5C), and 5-hydromethylcytosine. Hypoxanthine and xanthine can be created through mutagen presence, both of them through deamination (replacement of the amine group with a carbonyl group). Hypoxanthine can be modified from adenine. Xanthine can be modified from guanine. Uracil can result from deamination of cytosine. A “nucleoside” consists of a nucleobase and a five carbon sugar (either ribose or deoxyribose). Examples of a nucleoside include adenosine, guanosine, uridine, cytidine, 5-methyluridine (m5U), deoxyadenosine, deoxyguanosine, thymidine, deoxyuridine, and deoxycytidine. Examples of a nucleoside with a modified nucleobase includes inosine (I), xanthosine (X), 7-methylguanosine (m7G), dihydrouridine (D), 5-methylcytidine (m5C), and pseudouridine (Ψ. A “nucleotide” consists of a nucleobase, a five carbon sugar (either ribose or deoxyribose), and at least one phosphate group. Non-limiting examples of modified nucleobases and/or chemical modifications that a modified nucleobase may include are the following: pseudo-uridine, 5-Methyl-cytosine, 2′-O-methyl-3′-phosphonoacetate, 2′-O-methyl thioPACE (MSP), 2′-O-methyl-PACE (MP), 2′-fluoro RNA (2′-F-RNA), constrained ethyl (S-cEt), 2′-O-methyl (‘M’), 2′-O-methyl-3′-phosphorothioate (‘MS’), 2′-O-methyl-3′-thiophosphonoacetate (‘MSP’), 5-methoxyuridine, phosphorothioate, and N1-Methylpseudouridine.

[0139] The term “nucleic acid programmable DNA binding protein” or “napDNAbp” may be used interchangeably with “polynucleotide programmable nucleotide binding domain” to refer to a protein that associates with a nucleic acid (e.g., DNA or RNA), such as a guide nucleic acid or guide polynucleotide (e.g., gRNA), that guides the napDNAbp to a specific nucleic acid sequence. In some embodiments, the polynucleotide programmable nucleotide binding domain is a polynucleotide programmable DNA binding domain. In some embodiments, the polynucleotide programmable nucleotide binding domain is a polynucleotide programmable RNA binding domain. In some embodiments, the polynucleotide programmable nucleotide binding domain is a Cas9 protein. A Cas9 protein can associate with a guide RNA that guides the Cas9 protein to a specific DNA sequence that is complementary to the guide RNA. In some embodiments, the napDNAbp is a Cas9 domain, for example a nuclease active Cas9, a Cas9 nickase (nCas9), or a nuclease inactive Cas9 (dCas9). Non-limiting examples of nucleic acid programmable DNA binding proteins include, Cas9 (e.g., dCas9 and nCas9), Cas12a/Cpf1, Cas12b/C2c1, Cas12c/C2c3, Cas12d/CasY, Cas12e/CasX, Cas12g, Cas12h, Cas12i, and Cas12j/CasΦ (Cas12j/Casphi). Non-limiting examples of Cas enzymes include Cas1, Cas1B, Cas2, Cas3, Cas4, Cas5, Cas5d, Cas5t, Cas5h, Cas5a, Cas6, Cas7, Cas8, Cas8a, Cas8b, Cas8c, Cas9 (also known as Csn1 or Csx12), Cas10, Cas10d, Cas12a/Cpf1, Cas12b/C2c1, Cas12c/C2c3, Cas12d/CasY, Cas12e/CasX, Cas12g, Cas12h, Cas12i, Cas12j/CasΦ, Cpf1, Csy1, Csy2, Csy3, Csy4, Cse1, Cse2, Cse3, Cse4, Cse5e, Csc1, Csc2, Csa5, Csn1, Csn2, Csm1, Csm2, Csm3, Csm4, Csm5, Csm6, Cmr1, Cmr3, Cmr4, Cmr5, Cmr6, Csb1, Csb2, Csb3, Csx17, Csx14, Csx10, Csx16, CsaX, Csx3, Csx1, Csx1S, Csx11, Csf1, Csf2, CsO, Csf4, Csd1, Csd2, Cst1, Cst2, Csh1, Csh2, Csa1, Csa2, Csa3, Csa4, Csa5, Type II Cas effector proteins, Type V Cas effector proteins, Type VI Cas effector proteins, CARF, DinG, homologues thereof, or modified or engineered versions thereof. Other nucleic acid programmable DNA binding proteins are also within the scope of this disclosure, although they may not be specifically listed in this disclosure. See, e.g., Makarova et al. “Classification and Nomenclature of CRISPR-Cas Systems: Where from Here?” CRISPR J. 2018 October; 1:325-336. doi: 10.1089/crispr.2018.0033; Yan et al., “Functionally diverse type V CRISPR-Cas systems” Science. 2019 Jan. 4; 363(6422):88-91. doi: 10.1126/science.aav7271, the entire contents of each are hereby incorporated by reference. Exemplary nucleic acid programmable DNA binding proteins and nucleic acid sequences encoding nucleic acid programmable DNA binding proteins are provided in the Sequence Listing as SEQ ID NOs: 197-230.

[0140] The terms “nucleobase editing domain” or “nucleobase editing protein,” as used herein, refers to a protein or enzyme that can catalyze a nucleobase modification in RNA or DNA, such as cytosine (or cytidine) to uracil (or uridine) or thymine (or thymidine), and adenine (or adenosine) to hypoxanthine (or inosine) deaminations, as well as non-templated nucleotide additions and insertions. In some embodiments, the nucleobase editing domain is a deaminase domain (e.g., an adenine deaminase or an adenosine deaminase; or a cytidine deaminase or a cytosine deaminase).

[0141] As used herein, “obtaining” as in “obtaining an agent” includes synthesizing, purchasing, or otherwise acquiring the agent.

[0142] A “patient” or “subject” as used herein refers to a mammalian subject or individual diagnosed with, at risk of having or developing, or suspected of having or developing a disease or a disorder. In some embodiments, the term “patient” refers to a mammalian subject having or having a propensity to develop a disease (e.g., cancer, solid tumor, neoplasia) or a disorder. Exemplary patients can be humans, non-human primates, cats, dogs, pigs, cattle, cats, horses, camels, llamas, goats, sheep, rodents (e.g., mice, rabbits, rats, or guinea pigs) and other mammalians that can benefit from the therapies disclosed herein. Exemplary human patients can be male and/or female.

[0143] “Patient in need thereof” or “subject in need thereof” is referred to herein as a patient diagnosed with, at risk or having, predetermined to have, or suspected of having a disease or disorder.

[0144] The terms “pathogenic mutation”, “pathogenic variant”, “disease casing mutation”, “disease causing variant”, “deleterious mutation”, or “predisposing mutation” refers to a genetic alteration or mutation that increases an individual's susceptibility or predisposition to a certain disease or disorder (e.g., cancer, solid tumor, neoplasia). In some embodiments, the pathogenic mutation comprises at least one wild-type amino acid substituted by at least one pathogenic amino acid in a protein encoded by a gene.

[0145] The term “pharmaceutically-acceptable carrier” means a pharmaceutically-acceptable material, composition or vehicle, such as a liquid or solid filler, diluent, excipient, manufacturing aid (e.g., lubricant, talc magnesium, calcium or zinc stearate, or steric acid), or solvent encapsulating material, involved in carrying or transporting the compound from one site (e.g., the delivery site) of the body, to another site (e.g., organ, tissue or portion of the body). A pharmaceutically acceptable carrier is “acceptable” in the sense of being compatible with the other ingredients of the formulation and not injurious to the tissue of the subject (e.g., physiologically compatible, sterile, physiologic pH, etc.). The terms such as “excipient,” “carrier,” “pharmaceutically acceptable carrier,” “vehicle,” or the like are used interchangeably herein.

[0146] By “programmed cell death 1 (PD1) polypeptide” is meant a protein having at least about 85% amino acid sequence identity to GenBank Accession No. AJS10360.1, which is provided below, or a fragment thereof having immunomodulatory activity.
[0147] >AJS10360.1 programmed cell death 1 protein [Homo sapiens]

(SEQ ID NO: 478)
MQIPQAPWPVVWAVLQLGWRPGWFLDSPDRPWNPPTFSPALLVVTEGDN
ATFTCSFSNTSESFVLNWYRMSPSNQTDKLAAFPEDRSQPGQDCRFRVT
QLPNGRDFHMSVVRARRNDSGTYLCGAISLAPKAQIKESLRAELRVTER
RAEVPTAHPSPSPRPAGQFQTLVVGVVGGLLGSLVLLVWVLAVICSRAA
RGTIGARRTGQPLKEDPSAVPVFSVDYGELDFQWREKTPEPPVPCVPEQ
TEYATIVFPSGMGTSSPARRGSADGPRSAQPLRPEDGHCSWPL.

[0148] By “programmed cell death 1 (PD1) polynucleotide” is meant a nucleic acid molecule encoding an x polypeptide, as well as the introns, exons, 3′ untranslated regions, 5′ untranslated regions, and regulatory sequences associated with its expression, or fragments thereof. An exemplary PD1 polynucleotide sequence is provided at GenBank Accession No. KJ865861.1, which is provided below. An exemplary PD1 polynucleotide sequence is also provided at Ensenbl accession no: ENSG00000188389.
[0149] >KJ865861.1 Homo sapiens cell-line G3361 programmed cell death 1 protein (PDCD1) mRNA, complete cds

(SEQ ID NO: 479)
ATGCAGATCCCACAGGCGCCCTGGCCAGTCGTCTGGGCGGTGCTACAACT
GGGCTGGCGGCCAGGATGGTTCTTAGACTCCCCAGACAGGCCCTGGAACC
CCCCCACCTTCTCCCCAGCCCTGCTCGTGGTGACCGAAGGGGACAACGCC
ACCTTCACCTGCAGCTTCTCCAACACATCGGAGAGCTTCGTGCTAAACTG
GTACCGCATGAGCCCCAGCAACCAGACGGACAAGCTGGCCGCCTTCCCCG
AGGACCGCAGCCAGCCCGGCCAGGACTGCCGCTTCCGTGTCACACAACTG
CCCAACGGGCGTGACTTCCACATGAGCGTGGTCAGGGCCCGGCGCAATGA
CAGCGGCACCTACCTCTGTGGGGCCATCTCCCTGGCCCCCAAGGCGCAGA
TCAAAGAGAGCCTGCGGGCAGAGCTCAGGGTGACAGAGAGAAGGGCAGAA
GTGCCCACAGCCCACCCCAGCCCCTCACCCAGGCCAGCCGGCCAGTTCCA
AACCCTGGTGGTTGGTGTCGTGGGCGGCCTGCTGGGCAGCCTGGTGCTGC
TAGTCTGGGTCCTGGCCGTCATCTGCTCCCGGGCCGCACGAGGGACAATA
GGAGCCAGGCGCACCGGCCAGCCCCTGAAGGAGGACCCCTCAGCCGTGCC
TGTGTTCTCTGTGGACTATGGGGAGCTGGATTTCCAGTGGCGAGAGAAGA
CCCCGGAGCCCCCCGTGCCCTGTGTCCCTGAGCAGACGGAGTATGCCACC
ATTGTCTTTCCTAGCGGAATGGGCACCTCATCCCCCGCCCGCAGGGGCTC
AGCCGACGGCCCTCGGAGTGCCCAGCCACTGAGGCCTGAGGATGGACACT
GCTCTTGGCCCCTCTGA.

[0150] The term “pharmaceutical composition” means a composition formulated for pharmaceutical use. In some embodiments, the pharmaceutical composition further comprises a pharmaceutically acceptable carrier. In some embodiments, the pharmaceutical composition comprises additional agents (e.g., for specific delivery, increasing half-life, or other therapeutic compounds).

[0151] The terms “protein”, “peptide”, “polypeptide”, and their grammatical equivalents are used interchangeably herein, and refer to a polymer of amino acid residues linked together by peptide (amide) bonds. A protein, peptide, or polypeptide can be naturally occurring, recombinant, or synthetic, or any combination thereof.

[0152] The term “fusion protein” as used herein refers to a hybrid polypeptide which comprises protein domains from at least two different proteins.

[0153] By “rBE4 polypeptide” is meant a polypeptide sharing at least 85% amino acid sequence identity to the below amino acid sequence and having cytidine base editor activity.

(SEQ ID NO: 453)
MSSETGPVAVDPTLRRRIEPHEFEVFFDPRELRKETCLLYEINWGGRHSI
WRHTSQNTNKHVEVNFIEKFTTERYFCPNTRCSITWFLSWSPCGECSRAI
TEFLSRYPHVTLFIYIARLYHHADPRNRQGLRDLISSGVTIQIMTEQESG
YCWRNFVNYSPSNEAHWPRYPHLWVRLYVLELYCIILGLPPCLNILRRKQ
PQLTFFTIALQSCHYQRLPPHILWATGLKSGGSSGGSSGSETPGTSESAT
PESSGGSSGGSDKKYSIGLAIGTNSVGWAVITDEYKVPSKKFKVLGNTDR
HSIKKNLIGALLFDSGETAEATRLKRTARRRYTRRKNRICYLQEIFSNEM
AKVDDSFFHRLEESFLVEEDKKHERHPIFGNIVDEVAYHEKYPTIYHLRK
KLVDSTDKADLRLIYLALAHMIKFRGHFLIEGDLNPDNSDVDKLFIQLVQ
TYNQLFEENPINASGVDAKAILSARLSKSRRLENLIAQLPGEKKNGLFGN
LIALSLGLTPNFKSNFDLAEDAKLQLSKDTYDDDLDNLLAQIGDQYADLF
LAAKNLSDAILLSDILRVNTEITKAPLSASMIKRYDEHHQDLTLLKALVR
QQLPEKYKEIFFDQSKNGYAGYIDGGASQEEFYKFIKPILEKMDGTEELL
VKLNREDLLRKQRTFDNGSIPHQIHLGELHAILRRQEDFYPFLKDNREKI
EKILTFRIPYYVGPLARGNSRFAWMTRKSEETITPWNFEEVVDKGASAQS
FIERMTNFDKNLPNEKVLPKHSLLYEYFTVYNELTKVKYVTEGMRKPAFL
SGEQKKAIVDLLFKTNRKVTVKQLKEDYFKKIECFDSVEISGVEDRFNAS
LGTYHDLLKIIKDKDFLDNEENEDILEDIVLTLTLFEDREMIEERLKTYA
HLFDDKVMKQLKRRRYTGWGRLSRKLINGIRDKQSGKTILDFLKSDGFAN
RNFMQLIHDDSLTFKEDIQKAQVSGQGDSLHEHIANLAGSPAIKKGILQT
VKVVDELVKVMGRHKPENIVIEMARENQTTQKGQKNSRERMKRIEEGIKE
LGSQILKEHPVENTQLQNEKLYLYYLQNGRDMYVDQELDINRLSDYDVDH
IVPQSFLKDDSIDNKVLTRSDKNRGKSDNVPSEEVVKKMKNYWRQLLNAK
LITQRKFDNLTKAERGGLSELDKAGFIKRQLVETRQITKHVAQILDSRMN
TKYDENDKLIREVKVITLKSKLVSDFRKDFQFYKVREINNYHHAHDAYLN
AVVGTALIKKYPKLESEFVYGDYKVYDVRKMIAKSEQEIGKATAKYFFYS
NIMNFFKTEITLANGEIRKRPLIETNGETGEIVWDKGRDFATVRKVLSMP
QVNIVKKTEVQTGGFSKESILPKRNSDKLIARKKDWDPKKYGGFDSPTVA
YSVLVVAKVEKGKSKKLKSVKELLGITIMERSSFEKNPIDFLEAKGYKEV
KKDLIIKLPKYSLFELENGRKRMLASAGELQKGNELALPSKYVNFLYLAS
HYEKLKGSPEDNEQKQLFVEQHKHYLDEIIEQISEFSKRVILADANLDKV
LSAYNKHRDKPIREQAENIIHLFTLTNLGAPAAFKYFDTTIDRKRYTSTK
EVLDATLIHQSITGLYETRIDLSQLGGDSGGSGGSGGSTNLSDIIEKETG
KQLVIQESILMLPEEVEEVIGNKPESDILVHTAYDESTDENVMLLTSDAP
EYKPWALVIQDSNGENKIKMLSGGSGGSGGSTNLSDIIEKETGKQLVIQE
SILMLPEEVEEVIGNKPESDILVHTAYDESTDENVMLLTSDAPEYKPWAL
VIQDSNGENKIKMLSGGSKRTADGSEFESPKKKRKVE.

[0154] By “rBE4 polynucleotide” is meant a polynucleotide encoding a rBE4 polypeptide.

[0155] The term “recombinant” as used herein in the context of proteins or nucleic acids refers to proteins or nucleic acids that do not occur in nature, but are the product of human engineering. For example, in some embodiments, a recombinant protein or nucleic acid molecule comprises an amino acid or nucleotide sequence that comprises at least one, at least two, at least three, at least four, at least five, at least six, or at least seven mutations as compared to any naturally occurring sequence.

[0156] By “reduces” is meant a negative alteration of at least 5%, 10%, 15%, 20%, 25%, 30%, 35%, 40%, 45%, 50%, 55%, 60%, 65%, 70%, 75%, 80%, 85%, 90%, 95% or 100%. In embodiments, the expression of a polypeptide or polynucleotide target is rendered virtually undetectable using standard methods for measuring polypeptides (e.g., flow cytometry, ELISA, Western Blot) and polynucleotides (e.g., qPCR, Northern blot). In embodiments, the negative alteration is of a marker (e.g., pCREB). In some cases, a reduction is measured using pCREB staining. In some cases, a reduction is measured using a functional readout. For example, cells can be placed under hypoxic stress (e.g., 1% oxygen) and a response to hypoxia evaluated. Under such hypoxic conditions, cells edited to be deficient in A2AR and/or HIF (e.g., HIF1a) expression and/or activity will produce more cytokine than unedited cells under similar conditions. HIF1α expression under hypoxic conditions is associated with reduced cytokine production.

[0157] By “reference” is meant a standard or control condition. In one embodiment, the reference is a wild-type or healthy cell (e.g., immune cell (e.g., T- or NK-cell)). In one embodiment, the reference is an unedited cell (e.g., immune cell (e.g., T- or NK-cell)). In other embodiments and without limitation, a reference is an untreated cell that is not subjected to a test condition, or is subjected to placebo or normal saline, medium, buffer, and/or a control vector that does not harbor a polynucleotide of interest. In some instances, the reference is an unedited cell and/or a wild type cell. In some cases the reference is a cell cultured in an immunosuppressive environment (e.g., hypoxic environment and/or a solid tumor microenvironment (sTME)).

[0158] A “reference sequence” is a defined sequence used as a basis for sequence comparison. A reference sequence may be a subset of or the entirety of a specified sequence; for example, a segment of a full-length cDNA or gene sequence, or the complete cDNA or gene sequence. For polypeptides, the length of the reference polypeptide sequence will generally be at least about 16 amino acids, at least about 20 amino acids, at least about 25 amino acids, about 35 amino acids, about 50 amino acids, or about 100 amino acids. For nucleic acids, the length of the reference nucleic acid sequence will generally be at least about 50 nucleotides, at least about 60 nucleotides, at least about 75 nucleotides, about 100 nucleotides or about 300 nucleotides or any integer thereabout or therebetween. In some embodiments, a reference sequence is a wild-type sequence of a protein of interest. In other embodiments, a reference sequence is a polynucleotide sequence encoding a wild-type protein.

[0159] The term “RNA-programmable nuclease,” and “RNA-guided nuclease” are used with (e.g., binds or associates with) one or more RNA(s) that is not a target for cleavage. In some embodiments, an RNA-programmable nuclease, when in a complex with an RNA, may be referred to as a nuclease:RNA complex. Typically, the bound RNA(s) is referred to as a guide RNA (gRNA). In some embodiments, the RNA-programmable nuclease is the (CRISPR-associated system) Cas9 endonuclease, for example, Cas9 (Csn1) from Streptococcus pyogenes.

[0160] The term “single nucleotide polymorphism (SNP)” is a variation in a single nucleotide that occurs at a specific position in the genome, where each variation is present to some appreciable degree within a population (e.g., >1%). SNPs can fall within coding regions of genes, non-coding regions of genes, or in the intergenic regions (regions between genes). In some embodiments, SNPs within a coding sequence do not necessarily change the amino acid sequence of the protein that is produced, due to degeneracy of the genetic code. SNPs in the coding region are of two types: synonymous and nonsynonymous SNPs. Synonymous SNPs do not affect the protein sequence, while nonsynonymous SNPs change the amino acid sequence of protein. The nonsynonymous SNPs are of two types: missense and nonsense. SNPs that are not in protein-coding regions can still affect gene splicing, transcription factor binding, messenger RNA degradation, or the sequence of noncoding RNA. Gene expression affected by this type of SNP is referred to as an eSNP (expression SNP) and can be upstream or downstream from the gene. A single nucleotide variant (SNV) is a variation in a single nucleotide without any limitations of frequency and can arise in somatic cells. A somatic single nucleotide variation can also be called a single-nucleotide alteration.

[0161] By “specifically binds” is meant a nucleic acid molecule, polypeptide, polypeptide/polynucleotide complex, compound, or molecule that recognizes and binds a polypeptide and/or nucleic acid molecule of the invention, but which does not substantially recognize and bind other molecules in a sample, for example, a biological sample.

[0162] By “substantially identical” is meant a polypeptide or nucleic acid molecule exhibiting at least 50% identity to a reference amino acid sequence. In one embodiment, a reference sequence is a wild-type amino acid or nucleic acid sequence. In another embodiment, a reference sequence is any one of the amino acid or nucleic acid sequences described herein. In one embodiment, such a sequence is at least 60%, 80%, 85%, 90%, 95% or even 99% identical at the amino acid level or nucleic acid level to the sequence used for comparison.

[0163] Sequence identity is typically measured using sequence analysis software (for example, Sequence Analysis Software Package of the Genetics Computer Group, University of Wisconsin Biotechnology Center, 1710 University Avenue, Madison, Wis. 53705, BLAST, BESTFIT, GAP, or PILEUP/PRETTYBOX programs). Such software matches identical or similar sequences by assigning degrees of homology to various substitutions, deletions, and/or other modifications. Conservative substitutions typically include substitutions within the following groups: glycine, alanine; valine, isoleucine, leucine; aspartic acid, glutamic acid, asparagine, glutamine; serine, threonine; lysine, arginine; and phenylalanine, tyrosine. In an exemplary approach to determining the degree of identity, a BLAST program may be used, with a probability score between e⁻³ and e⁻¹⁰⁰ indicating a closely related sequence. COBALT is used, for example, with the following parameters:
[0164] a) alignment parameters: Gap penalties-11,-1 and End-Gap penalties-5,-1,
[0165] b) CDD Parameters: Use RPS BLAST on; Blast E-value 0.003; Find Conserved columns and Recompute on, and
[0166] c) Query Clustering Parameters: Use query clusters on; Word Size 4; Max cluster distance 0.8; Alphabet Regular.
   EMBOSS Needle is used, for example, with the following parameters:
[0167] a) Matrix: BLOSUM62;
[0168] b) GAP OPEN: 10;
[0169] c) GAP EXTEND: 0.5;
[0170] d) OUTPUT FORMAT: pair;
[0171] e) END GAP PENALTY: false;
[0172] f) END GAP OPEN: 10; and
[0173] g) END GAP EXTEND: 0.5.

[0174] Nucleic acid molecules useful in the methods of the invention include any nucleic acid molecule that encodes a polypeptide of the invention or a fragment thereof. Such nucleic acid molecules need not be 100% identical with an endogenous nucleic acid sequence, but will typically exhibit substantial identity. Polynucleotides having “substantial identity” to an endogenous sequence are typically capable of hybridizing with at least one strand of a double-stranded nucleic acid molecule. Nucleic acid molecules useful in the methods of the invention include any nucleic acid molecule that encodes a polypeptide of the invention or a fragment thereof. Such nucleic acid molecules need not be 100% identical with an endogenous nucleic acid sequence, but will typically exhibit substantial identity. Polynucleotides having “substantial identity” to an endogenous sequence are typically capable of hybridizing with at least one strand of a double-stranded nucleic acid molecule. By “hybridize” is meant pair to form a double-stranded molecule between complementary polynucleotide sequences (e.g., a gene described herein), or portions thereof, under various conditions of stringency. (See, e.g., Wahl, G. M. and S. L. Berger (1987) Methods Enzymol. 152:399; Kimmel, A. R. (1987) Methods Enzymol. 152:507).

[0175] For example, stringent salt concentration will ordinarily be less than about 750 mM NaCl and 75 mM trisodium citrate, preferably less than about 500 mM NaCl and 50 mM trisodium citrate, and more preferably less than about 250 mM NaCl and 25 mM trisodium citrate. Low stringency hybridization can be obtained in the absence of organic solvent, e.g., formamide, while high stringency hybridization can be obtained in the presence of at least about 35% formamide, and more preferably at least about 50% formamide. Stringent temperature conditions will ordinarily include temperatures of at least about 30° C., more preferably of at least about 37° C., and most preferably of at least about 42° C. Varying additional parameters, such as hybridization time, the concentration of detergent, e.g., sodium dodecyl sulfate (SDS), and the inclusion or exclusion of carrier DNA, are well known to those skilled in the art. Various levels of stringency are accomplished by combining these various conditions as needed. In a preferred: embodiment, hybridization will occur at 30° C. in 750 mM NaCl, 75 mM trisodium citrate, and 1% SDS. In a more preferred embodiment, hybridization will occur at 37° C. in 500 mM NaCl, 50 mM trisodium citrate, 1% SDS, 35% formamide, and 100 μg/ml denatured salmon sperm DNA (ssDNA). In a most preferred embodiment, hybridization will occur at 42° C. in 250 mM NaCl, 25 mM trisodium citrate, 1% SDS, 50% formamide, and 200 μg/ml ssDNA. Useful variations on these conditions will be readily apparent to those skilled in the art.

[0176] For most applications, washing steps that follow hybridization will also vary in stringency. Wash stringency conditions can be defined by salt concentration and by temperature. As above, wash stringency can be increased by decreasing salt concentration or by increasing temperature. For example, stringent salt concentration for the wash steps will preferably be less than about 30 mM NaCl and 3 mM trisodium citrate, and most preferably less than about 15 mM NaCl and 1.5 mM trisodium citrate. Stringent temperature conditions for the wash steps will ordinarily include a temperature of at least about 25° C., more preferably of at least about 42° C., and even more preferably of at least about 68° C. In an embodiment, wash steps will occur at 25° C. in 30 mM NaCl, 3 mM trisodium citrate, and 0.1% SDS. In another embodiment, wash steps will occur at 42 C in 15 mM NaCl, 1.5 mM trisodium citrate, and 0.1% SDS. In a more preferred embodiment, wash steps will occur at 68° C. in 15 mM NaCl, 1.5 mM trisodium citrate, and 0.1% SDS. Additional variations on these conditions will be readily apparent to those skilled in the art. Hybridization techniques are well known to those skilled in the art and are described, for example, in Benton and Davis (Science 196:180, 1977); Grunstein and Hogness (Proc. Natl. Acad. Sci., USA 72:3961, 1975); Ausubel et al. (Current Protocols in Molecular Biology, Wiley Interscience, New York, 2001); Berger and Kimmel (Guide to Molecular Cloning Techniques, 1987, Academic Press, New York); and Sambrook et al., Molecular Cloning: A Laboratory Manual, Cold Spring Harbor Laboratory Press, New York.

[0177] By “split” is meant divided into two or more fragments.

[0178] A “split Cas9 protein” or “split Cas9” refers to a Cas9 protein that is provided as an N-terminal fragment and a C-terminal fragment encoded by two separate nucleotide sequences. The polypeptides corresponding to the N-terminal portion and the C-terminal portion of the Cas9 protein may be spliced to form a “reconstituted” Cas9 protein.

The term “target site” refers to a sequence within a nucleic acid molecule that is deaminated by a deaminase (e.g., cytidine or cytosine deaminase; or adenine or adenosine deaminase), a fusion protein comprising a deaminase (e.g., a dCas9-adenosine deaminase fusion protein), or a base editor (e.g., adenine or adenosine base editor (ABE); or a cytidine or a cytosine base editor (CBE)) as disclosed herein).

[0179] By “T cell immunoglobulin mucin-3 (TIM3) polypeptide” is meant a protein having at least about 85% amino acid sequence identity to GenBank Accession No. AAL65157.1, which is provided below, or a fragment thereof having immunomodulatory activity.
[0180] >AAL65157.1 T cell immuno lobulin mucin-3 [Homo sapiens]

(SEQ ID NO: 480)
MFSHLPFDCVLLLLLLLLTRSSEVEYRAEVGQNAYLPCFYTPAAPGNLVPVCWGKGACPVFECG
NVVLRTDERDVNYWTSRYWLNGDFRKGDVSLTIENVTLADSGIYCCRIQIPGIMNDEKFNLKLV
IKPAKVTPAPTLQRDFTAAFPRMLTTRGHGPAETQTLGSLPDINLTQISTLANELRDSRLANDL
RDSGATIRIGIYIGAGICAGLALALIFGALIFKWYSHSKEKIQNLSLISLANLPPSGLANAVAE
GIRSEENIYTIEENVYEVEEPNEYYCYVSSRQQPSQPLGCRFAMP.

[0181] By “T cell immunoglobulin mucin-3 (TIM3) polynucleotide” is meant a nucleic acid molecule encoding an x polypeptide, as well as the introns, exons, 3′ untranslated regions, 5′ untranslated regions, and regulatory sequences associated with its expression, or fragments thereof. An exemplary TIM3 polynucleotide sequence is provided at GenBank Accession No. AF450242.1:58-963, which is provided below. An exemplary TIM3 polynucleotide sequence is also provided at Ensenbl accession no: ENSG00000135077.
[0182] >AF450242.1:58-963 Homo sapiens clone 1 T cell immunoglobulin mucin-3 (TIM3) mRNA, complete cds

(SEQ ID NO: 481)
ATGTTTTCACATCTTCCCTTTGACTGTGTCCTGCTGCTGCTGCTGCTACTACTTACAAGGTCCT
CAGAAGTGGAATACAGAGCGGAGGTCGGTCAGAATGCCTATCTGCCCTGCTTCTACACCCCAGC
CGCCCCAGGGAACCTCGTGCCCGTCTGCTGGGGCAAAGGAGCCTGTCCTGTGTTTGAATGTGGC
AACGTGGTGCTCAGGACTGATGAAAGGGATGTGAATTATTGGACATCCAGATACTGGCTAAATG
GGGATTTCCGCAAAGGAGATGTGTCCCTGACCATAGAGAATGTGACTCTAGCAGACAGTGGGAT
CTACTGCTGCCGGATCCAAATCCCAGGCATAATGAATGATGAAAAATTTAACCTGAAGTTGGTC
ATCAAACCAGCCAAGGTCACCCCTGCACCGACTCTGCAGAGAGACTTCACTGCAGCCTTTCCAA
GGATGCTTACCACCAGGGGACATGGCCCAGCAGAGACACAGACACTGGGGAGCCTCCCTGATAT
AAATCTAACACAAATATCCACATTGGCCAATGAGTTACGGGACTCTAGATTGGCCAATGACTTA
CGGGACTCTGGAGCAACCATCAGAATAGGCATCTACATCGGAGCAGGGATCTGTGCTGGGCTGG
CTCTGGCTCTTATCTTCGGCGCTTTAATTTTCAAATGGTATTCTCATAGCAAAGAGAAGATACA
GAATTTAAGCCTCATCTCTTTGGCCAACCTCCCTCCCTCAGGATTGGCAAATGCAGTAGCAGAG
GGAATTCGCTCAGAAGAAAACATCTATACCATTGAAGAGAACGTATATGAAGTGGAGGAGCCCA
ATGAGTATTATTGCTATGTCAGCAGCAGGCAGCAACCCTCACAACCTTTGGGTTGTCGCTTTGC
AATGCCATAG.

[0183] By “T cell receptor beta constant 1 (TRBC1) polypeptide” is meant a protein having at least about 85% amino acid sequence identity to UniProtKB/Swiss-Prot Accession No. P01850.4, which is provided below, or a fragment thereof having immunomodulatory activity.
[0184] >sp|P01850.4|TRBC1_HUMAN RecName: Full=T cell receptor beta constant 1

(SEQ ID NO: 482)
DLNKVFPPEVAVFEPSEAEISHTQKATLVCLATGFFPDHVELSWWVNGKEVHSGVSTDPQPLKE
QPALNDSRYCLSSRLRVSATFWQNPRNHFRCQVQFYGLSENDEWTQDRAKPVTQIVSAEAWGRA
DCGFTSVSYQQGVLSATILYEILLGKATLYAVLVSALVLMAMVKRKDF.

[0185] By “T cell receptor beta constant 1 (TRBC1) polynucleotide” is meant a nucleic acid molecule encoding a TRBC1 polypeptide, as well as the introns, exons, 3′ untranslated regions, 5′ untranslated regions, and regulatory sequences associated with its expression, or fragments thereof. An exemplary TRBC1 polynucleotide sequence is provided at Ensenbl accession no: ENSG00000211751.

[0186] By “transforming growth factor-beta type I receptor (TGFbetaR1; TGFbR1) polypeptide” is meant a protein having at least about 85% amino acid sequence identity to GenBank Accession No. AAD02042.1, which is provided below, or a fragment thereof having signal transduction activity.
[0187] >AAD02042.1 transforming growth factor-beta type I receptor [Homo sapiens]

(SEQ ID NO: 483)
MEAAVAAPRPRLLLLVLAAAAAAAAALLPGATALQCFCHLCTKDNFTCVTDGLCFVSVTETTDK
VIHNSMCIAEIDLIPRDRPFVCAPSSKTGSVTTTYCCNQDHCNKIELPTTVKSSPGLGPVELAA
VIAGPVCFVCISLMLMVYICHNRTVIHHRVPNEEDPSLDRPFISEGTTLKDLIYDMTTSGSGSG
LPLLVQRTIARTIVLQESIGKGRFGEVWRGKWRGEEVAVKIFSSREERSWFREAEIYQTVMLRH
ENILGFIAADNKDNGTWTQLWLVSDYHEHGSLFDYLNRYTVTVEGMIKLALSTASGLAHLHMEI
VGTQGKPAIAHRDLKSKNILVKKNGTCCIADLGLAVRHDSATDTIDIAPNHRVGTKRYMAPEVL
DDSINMKHFESFKRADIYAMGLVFWEIARRCSIGGIHEDYQLPYYDLVPSDPSVEEMRKVVCEQ
KLRPNIPNRWQSCEALRVMAKIMRECWYANGAARLTALRIKKTLSQLSQQEGIKM.

[0188] By “transforming growth factor-beta type I receptor (TGFbetaR1; TGFbR1) polynucleotide” is meant a nucleic acid molecule encoding an x polypeptide, as well as the introns, exons, 3′ untranslated regions, 5′ untranslated regions, and regulatory sequences associated with its expression, or fragments thereof. An exemplary TGFbetaR1 polynucleotide sequence is provided at GenBank Accession No. AH007196.2:71-167,467-712,1161-1391,1856-2086,2589-2756,3257-3413,3915-4039,4543-4673,5174-5299, which is provided below. An exemplary TGFbetaR1 polynucleotide sequence is also provided at Ensenbl accession no: ENSG00000106799.
[0189] >AH007196.2:71-167,467-712,1161-1391,1856-2086,2589-2756,3257-3413,3915-4039,4543-4673,5174-5299 Homo sapiens chromosome 9 transforming growth factor-beta type I receptor gene, complete cds (transforming growth factor-beta type I receptor)

(SEQ ID NO: 484)
ATGGAGGCGGCGGTCGCTGCTCCGCGTCCCCGGCTGCTCCTCCTCGTGCTGGCGGCGGCGGCGG
CGGCGGCGGCGGCGCTGCTCCCGGGGGCGACGGCGTTACAGTGTTTCTGCCACCTCTGTACAAA
AGACAATTTTACTTGTGTGACAGATGGGCTCTGCTTTGTCTCTGTCACAGAGACCACAGACAAA
GTTATACACAACAGCATGTGTATAGCTGAAATTGACTTAATTCCTCGAGATAGGCCGTTTGTAT
GTGCACCCTCTTCAAAAACTGGGTCTGTGACTACAACATATTGCTGCAATCAGGACCATTGCAA
TAAAATAGAACTTCCAACTACTGTAAAGTCATCACCTGGCCTTGGTCCTGTGGAACTGGCAGCT
GTCATTGCTGGACCAGTGTGCTTCGTCTGCATCTCACTCATGTTGATGGTCTATATCTGCCACA
ACCGCACTGTCATTCACCATCGAGTGCCAAATGAAGAGGACCCTTCATTAGATCGCCCTTTTAT
TTCAGAGGGTACTACGTTGAAAGACTTAATTTATGATATGACAACGTCAGGTTCTGGCTCAGGT
TTACCATTGCTTGTTCAGAGAACAATTGCGAGAACTATTGTGTTACAAGAAAGCATTGGCAAAG
GTCGATTTGGAGAAGTTTGGAGAGGAAAGTGGCGGGGAGAAGAAGTTGCTGTTAAGATATTCTC
CTCTAGAGAAGAACGTTCGTGGTTCCGTGAGGCAGAGATTTATCAAACTGTAATGTTACGTCAT
GAAAACATCCTGGGATTTATAGCAGCAGACAATAAAGACAATGGTACTTGGACTCAGCTCTGGT
TGGTGTCAGATTATCATGAGCATGGATCCCTTTTTGATTACTTAAACAGATACACAGTTACTGT
GGAAGGAATGATAAAACTTGCTCTGTCCACGGCGAGCGGTCTTGCCCATCTTCACATGGAGATT
GTTGGTACCCAAGGAAAGCCAGCCATTGCTCATAGAGATTTGAAATCAAAGAATATCTTGGTAA
AGAAGAATGGAACTTGCTGTATTGCAGACTTAGGACTGGCAGTAAGACATGATTCAGCCACAGA
TACCATTGATATTGCTCCAAACCACAGAGTGGGAACAAAAAGGTACATGGCCCCTGAAGTTCTC
GATGATTCCATAAATATGAAACATTTTGAATCCTTCAAACGTGCTGACATCTATGCAATGGGCT
TAGTATTCTGGGAAATTGCTCGACGATGTTCCATTGGTGGAATTCATGAAGATTACCAACTGCC
TTATTATGATCTTGTACCTTCTGACCCATCAGTTGAAGAAATGAGAAAAGTTGTTTTGAACAGA
AGTTAAGGCCAAATATCCCAAACAGATGGCAGAGCTGTGAAGCCTTGAGAGTAATGGCTAAAAT
TAGAGAGAATGTTGGTATGCCAATGGAGCAGCTAGGCTTACAGCATTGCGGATTAAGAAAACAT
TATCGCAACTCATCAACAGGAAGGCATCAAAATGTAA.

[0190] By “transforming growth factor-beta type II receptor (TGFbetaR2; TGFbR2) polypeptide” is meant a protein having at least about 85% amino acid sequence identity to GenBank Accession No. AAA61164.1, which is provided below, or a fragment thereof having signal transduction activity.
[0191] >AAA61164.1 TGF-beta type II receptor [Homo sapiens]

(SEQ ID NO: 485)
MGRGLLRGLWPLHIVLWTRIASTIPPHVQKSVNNDMIVTDNNGAVKFPQLCKFCDVRFSTCDNQ
KSCMSNCSITSICEKPQEVCVAVWRKNDENITLETVCHDPKLPYHDFILEDAASPKCIMKEKKK
PGETFFMCSCSSDECNDNIIFSEEYNTSNPDLLLVIFQVTGISLLPPLGVAISVIIIFYCYRVN
RQQKLSSTWETGKTRKLMEFSEHCAIILEDDRSDISSTCANNINHNTELLPIELDTLVGKGRFA
EVYKAKLKQNTSEQFETVAVKIFPYEEYASWKTEKDIFSDINLKHENILQFLTAEERKTELGKQ
YWLITAFHAKGNLQEYLTRHVISWEDLRKLGSSLARGIAHLHSDHTPCGRPKMPIVHRDLKSSN
ILVKNDLTCCLCDFGLSLRLDPTLSVDDLANSGQVGTARYMAPEVLESRMNLENAESFKQTDVY
SMALVLWEMTSRCNAVGEVKDYEPPFGSKVREHPCVESMKDNVLRDRGRPEIPSFWLNHQGIQM
VCETLTECWDHDPEARLTAQCVAERFSELEHLDRLSGRSCSEEKIPEDGSLNTTK.

[0192] By “transforming growth factor-beta type II receptor (TGFbetaR2; TGFbR2) polynucleotide” is meant a nucleic acid molecule encoding an x polypeptide, as well as the introns, exons, 3′ untranslated regions, 5′ untranslated regions, and regulatory sequences associated with its expression, or fragments thereof. An exemplary x polynucleotide sequence is provided at GenBank Accession No. M85079.1:336-2039, which is provided below. An exemplary TGFbetaR2 polynucleotide sequence is also provided at Ensenbl accession no: ENSG00000163513.
[0193] >M85079.1:336-2039 Human TGF-beta type II receptor mRNA, complete cds

(SEQ ID NO: 486)
ATGGGTCGGGGGCTGCTCAGGGGCCTGTGGCCGCTGCACATCGTCCTGTGGACGCGTATCGCCA
GCACGATCCCACCGCACGTTCAGAAGTCGGTTAATAACGACATGATAGTCACTGACAACAACGG
TGCAGTCAAGTTTCCACAACTGTGTAAATTTTGTGATGTGAGATTTTCCACCTGTGACAACCAG
AAATCCTGCATGAGCAACTGCAGCATCACCTCCATCTGTGAGAAGCCACAGGAAGTCTGTGTGG
CTGTATGGAGAAAGAATGACGAGAACATAACACTAGAGACAGTTTGCCATGACCCCAAGCTCCC
CTACCATGACTTTATTCTGGAAGATGCTGCTTCTCCAAAGTGCATTATGAAGGAAAAAAAAAAG
CCTGGTGAGACTTTCTTCATGTGTTCCTGTAGCTCTGATGAGTGCAATGACAACATCATCTTCT
CAGAAGAATATAACACCAGCAATCCTGACTTGTTGCTAGTCATATTTCAAGTGACAGGCATCAG
CCTCCTGCCACCACTGGGAGTTGCCATATCTGTCATCATCATCTTCTACTGCTACCGCGTTAAC
CGGCAGCAGAAGCTGAGTTCAACCTGGGAAACCGGCAAGACGCGGAAGCTCATGGAGTTCAGCG
AGCACTGTGCCATCATCCTGGAAGATGACCGCTCTGACATCAGCTCCACGTGTGCCAACAACAT
CAACCACAACACAGAGCTGCTGCCCATTGAGCTGGACACCCTGGTGGGGAAAGGTCGCTTTGCT
GAGGTCTATAAGGCCAAGCTGAAGCAGAACACTTCAGAGCAGTTTGAGACAGTGGCAGTCAAGA
TCTTTCCCTATGAGGAGTATGCCTCTTGGAAGACAGAGAAGGACATCTTCTCAGACATCAATCT
GAAGCATGAGAACATACTCCAGTTCCTGACGGCTGAGGAGCGGAAGACGGAGTTGGGGAAACAA
TACTGGCTGATCACCGCCTTCCACGCCAAGGGCAACCTACAGGAGTACCTGACGCGGCATGTCA
TCAGCTGGGAGGACCTGCGCAAGCTGGGCAGCTCCCTCGCCCGGGGGATTGCTCACCTCCACAG
TGATCACACTCCATGTGGGAGGCCCAAGATGCCCATCGTGCACAGGGACCTCAAGAGCTCCAAT
ATCCTCGTGAAGAACGACCTAACCTGCTGCCTGTGTGACTTTGGGCTTTCCCTGCGTCTGGACC
CTACTCTGTCTGTGGATGACCTGGCTAACAGTGGGCAGGTGGGAACTGCAAGATACATGGCTCC
AGAAGTCCTAGAATCCAGGATGAATTTGGAGAATGCTGAGTCCTTCAAGCAGACCGATGTCTAC
TCCATGGCTCTGGTGCTCTGGGAAATGACATCTCGCTGTAATGCAGTGGGAGAAGTAAAAGATT
ATGAGCCTCCATTTGGTTCCAAGGTGCGGGAGCACCCCTGTGTCGAAAGCATGAAGGACAACGT
GTTGAGAGATCGAGGGCGACCAGAAATTCCCAGCTTCTGGCTCAACCACCAGGCATCCAGATGG
TGTGTGAGACGTTGACTGAGTGCTGGGACCACGACCCAGAGGCCCGTCTCACAGCCCAGTGTGT
GGCAGAACGCTTCAGTGAGCTGGAGCATCTGGACAGGCTCTCGGGGAGGAGCTGCTCGGAGGAG
AAGATTCCTGAAGACGGCTCCCTAAACACTACCAAATAG.

[0194] By “T Cell Receptor Alpha Constant (TRAC) polypeptide” is meant a protein having at least about 85% amino acid sequence identity to NCBI Accession No. P01848.2, or a fragment thereof having immunomodulatory activity. An exemplary amino acid sequence is provided below.
[0195] >sp|P01848.2|TRAC_HUMAN RecName: Full=T cell receptor alpha constant

(SEQ ID NO: 487)
IQNPDPAVYQLRDSKSSDKSVCLFTDFDSQTNVSQSKDSDVYITDKTVLDMRSMDFKSNSAVAW
SNKSDFACANAFNNSIIPEDTFFPSPESSCDVKLVEKSFETDTNLNFQNLSVIGFRILLLKVAG
FNLLMTLRLWSS.

[0196] By “T Cell Receptor Alpha Constant (TRAC) polynucleotide” is meant a nucleic acid molecule encoding a TRAC polypeptide, as well as the introns, exons, 3′ untranslated regions, 5′ untranslated regions, and regulatory sequences associated with its expression, or fragments thereof. An exemplary TRAC polynucleotide is provided at Gene ENSG00000277734.8, which is provided below.
[0197] >UCSC human genome database, Gene ENSG00000277734.8 Human T-cell receptor alpha chain (TCR-alpha)

(SEQ ID NO: 488)
catgctaatcctccggcaaacctctgtttcctcctcaaaaggcaggaggtcggaaagaataaacaatgag
agtcacattaaaaacacaaaatcctacggaaatactgaagaatgagtctcagcactaaggaaaagcctcc
agcagctcctgctttctgagggtgaaggatagacgctgtggctctgcatgactcactagcactctatcac
ggccatattctggcagggtcagtggctccaactaacatttgtttggtactttacagtttattaaatagat
gtttatatggagaagctctcatttctttctcagaagagcctggctaggaaggtggatgaggcaccatatt
cattttgcaggtgaaattcctgagatgtaaggagctgctgtgacttgctcaaggccttatatcgagtaaa
cggtagtgctggggcttagacgcaggtgttctgatttatagttcaaaacctctatcaatgagagagcaat
ctcctggtaatgtgatagatttcccaacttaatgccaacataccataaacctcccattctgctaatgccc
agcctaagttggggagaccactccagattccaagatgtacagtttgctttgctgggcctttttcccatgc
ctgcctttactctgccagagttatattgctggggttttgaagaagatcctattaaataaaagaataagca
gtattattaagtagccctgcatttcaggtttccttgagtggcaggccaggcctggccgtgaacgttcact
gaaatcatggcctcttggccaagattgatagcttgtgcctgtccctgagtcccagtccatcacgagcagc
tggtttctaagatgctatttcccgtataaagcatgagaccgtgacttgccagccccacagagccccgccc
ttgtccatcactggcatctggactccagcctgggttggggcaaagagggaaatgagatcatgtcctaacc
ctgatcctcttgtcccacagATATCCAGAACCCTGACCCTGCCGTGTACCAGCTGAGAGACTCTAAATCC
AGTGACAAGTCTGTCTGCCTATTCACCGATTTTGATTCTCAAACAAATGTGTCACAAAGTAAGGATTCTG
ATGTGTATATCACAGACAAAACTGTGCTAGACATGAGGTCTATGGACTTCAAGAGCAACAGTGCTGTGGC
CTGGAGCAACAAATCTGACTTTGCATGTGCAAACGCCTTCAACAACAGCATTATTCCAGAAGACACCTTC
TTCCCCAGCCCAGgtaagggcagctttggtgccttcgcaggctgtttccttgcttcaggaatggccaggt
tctgcccagagctctggtcaatgatgtctaaaactcctctgattggtggtctcggccttatccattgcca
ccaaaaccctctttttactaagaaacagtgagccttgttctggcagtccagagaatgacacgggaaaaaa
gcagatgaagagaaggtggcaggagagggcacgtggcccagcctcagtctctccaactgagttcctgcct
gcctgcctttgctcagactgtttgccccttactgctcttctaggcctcattctaagccccttctccaagt
tgcctctccttatttctccctgtctgccaaaaaatctttcccagctcactaagtcagtctcacgcagtca
ctcattaacccaccaatcactgattgtgccggcacatgaatgcaccaggtgttgaagtggaggaattaaa
aagtcagatgaggggtgtgcccagaggaagcaccattctagttgggggagcccatctgtcagctgggaaa
agtccaaataacttcagattggaatgtgttttaactcagggttgagaaaacagctaccttcaggacaaaa
gtcagggaagggctctctgaagaaatgctacttgaagataccagccctaccaagggcagggagaggaccc
tatagaggcctgggacaggagctcaatgagaaaggagaagagcagcaggcatgagttgaatgaaggaggc
agggccgggtcacagggccttctaggccatgagagggtagacagtattctaaggacgccagaaagctgtt
gatcggcttcaagcaggggagggacacctaatttgcttttcttttttttttttttttttttttttttttt
tgagatggagttttgctcttgttgcccaggctggagtgcaatggtgcatcttggctcactgcaacctccg
cctcccaggttcaagtgattctcctgcctcagcctcccgagtagctgagattacaggcacccgccaccat
gcctggctaattttttgtatttttagtagagacagggtttcactatgttggccaggctggtctcgaactc
ctgacctcaggtgatccacccgcttcagcctcccaaagtgctgggattacaggcgtgagccaccacaccc
ggcctgcttttcttaaagatcaatctgagtgctgtacggagagtgggttgtaagccaagagtagaagcag
aaagggagcagttgcagcagagagatgatggaggcctgggcagggtggtggcagggaggtaaccaacacc
attcaggtttcaaaggtagaaccatgcagggatgagaaagcaaagaggggatcaaggaaggcagctggat
tttggcctgagcagctgagtcaatgatagtgccgtttactaagaagaaaccaaggaaaaaatttggggtg
cagggatcaaaactttttggaacatatgaaagtacgtgtttatactctttatggcccttgtcactatgta
tgcctcgctgcctccattggactctagaatgaagccaggcaagagcagggtctatgtgtgatggcacatg
tggccagggtcatgcaacatgtactttgtacaaacagtgtatattgagtaaatagaaatggtgtccagga
gccgaggtatcggtcctgccagggccaggggctctccctagcaggtgctcatatgctgtaagttccctcc
agatctctccacaaggaggcatggaaaggctgtagttgttcacctgcccaagaactaggaggtctggggt
gggagagtcagcctgctctggatgctgaaagaatgtctgtttttccttttagAAAGTTCCTGTGATGTCA
AGCTGGTCGAGAAAAGCTTTGAAACAGgtaagacaggggtctagcctgggtttgcacaggattgcggaag
tgatgaacccgcaataaccctgcctggatgagggagtgggaagaaattagtagatgtgggaatgaatgat
gaggaatggaaacagcggttcaagacctgcccagagctgggtggggtctctcctgaatccctctcaccat
ctctgactttccattctaagcactttgaggatgagtttctagcttcaatagaccaaggactctctcctag
gcctctgtattcctttcaacagctccactgtcaagagagccagagagagcttctgggtggcccagctgtg
aaatttctgagtcccttagggatagccctaaacgaaccagatcatcctgaggacagccaagaggttttgc
cttctttcaagacaagcaacagtactcacataggctgtgggcaatggtcctgtctctcaagaatcccctg
ccactcctcacacccaccctgggcccatattcatttccatttgagttgttcttattgagtcatccttcct
gtggtagcggaactcactaaggggcccatctggacccgaggtattgtgatgataaattctgagcacctac
cccatccccagaagggctcagaaataaaataagagccaagtctagtcggtgtttcctgtcttgaaacaca
atactgttggccctggaagaatgcacagaatctgtttgtaaggggatatgcacagaagctgcaagggaca
ggaggtgcaggagctgcaggcctcccccacccagcctgctctgccttggggaaaaccgtgggtgtgtcct
gcaggccatgcaggcctgggacatgcaagcccataaccgctgtggcctcttggttttacagATACGAACC
TAAACTTTCAAAACCTGTCAGTGATTGGGTTCCGAATCCTCCTCCTGAAAGTGGCCGGGTTTAATCTGCT
CATGACGCTGCGGCTGTGGTCCAGCTGAGgtgaggggccttgaagctgggagtggggtttagggacgcgg
gtctctgggtgcatcctaagctctgagagcaaacctccctgcagggtcttgcttttaagtccaaagcctg
agcccaccaaactctcctacttcttcctgttacaaattcctcttgtgcaataataatggcctgaaacgct
gtaaaatatcctcatttcagccgcctcagttgcacttctcccctatgaggtaggaagaacagttgtttag
aaacgaagaaactgaggccccacagctaatgagtggaggaagagagacacttgtgtacaccacatgcctt
gtgttgtacttctctcaccgtgtaacctcctcatgtcctctctccccagtacggctctcttagctcagta
gaaagaagacattacactcatattacaccccaatcctggctagagtctccgcaccctcctcccccagggt
ccccagtcgtcttgctgacaactgcatcctgttccatcaccatcaaaaaaaaactccaggctgggtgcgg
gggctcacacctgtaatcccagcactttgggaggcagaggcaggaggagcacaggagctggagaccagcc
tgggcaacacagggagaccccgcctctacaaaaagtgaaaaaattaaccaggtgtggtgctgcacacctg
tagtcccagctacttaagaggctgagatgggaggatcgcttgagccctggaatgttgaggctacaatgag
ctgtgattgcgtcactgcactccagcctggaagacaaagcaagatcctgtctcaaataataaaaaaaata
agaactccagggtacatttgctcctagaactctaccacatagccccaaacagagccatcaccatcacatc
cctaacagtcctgggtcttcctcagtgtccagcctgacttctgttcttcctcattccagATCTGCAAGAT
TGTAAGACAGCCTGTGCTCCCTCGCTCCTTCCTCTGCATTGCCCCTCTTCTCCCTCTCCAAACAGAGGGA
ACTCTCCTACCCCCAAGGAGGTGAAAGCTGCTACCACCTCTGTGCCCCCCCGGCAATGCCACCAACTGGA
TCCTACCCGAATTTATGATTAAGATTGCTGAAGAGCTGCCAAACACTGCTGCCACCCCCTCTGTTCCCTT
ATTGCTGCTTGTCACTGCCTGACATTCACGGCAGAGGCAAGGCTGCTGCAGCCTCCCCTGGCTGTGCACA
TTCCCTCCTGCTCCCCAGAGACTGCCTCCGCCATCCCACAGATGATGGATCTTCAGTGGGTTCTCTTGGG
CTCTAGGTCCTGCAGAATGTTGTGAGGGGTTTATTTTTTTTTAATAGTGTTCATAAAGAAATACATAGTA
TTCTTCTTCTCAAGACGTGGGGGGAAATTATCTCATTATCGAGGCCCTGCTATGCTGTGTATCTGGGCGT
GTTGTATGTCCTGCTGCCGATGCCTTCATTAAAATGATTTGGAAGAGCAGA.

[0198] Nucleotides in lower case above are untranslated regions or introns, and nucleotides in upper cases are exons.
[0199] >X02592.1 Human mRNA for T-cell receptor alpha chain (TCR-alpha)

(SEQ ID NO: 489)
TTTTGAAACCCTTCAAAGGCAGAGACTTGTCCAGCCTAACCTGCCTGCTGCTCCTAGCTCCTGA
GGCTCAGGGCCCTTGGCTTCTGTCCGCTCTGCTCAGGGCCCTCCAGCGTGGCCACTGCTCAGCC
ATGCTCCTGCTGCTCGTCCCAGTGCTCGAGGTGATTTTTACCCTGGGAGGAACCAGAGCCCAGT
CGGTGACCCAGCTTGGCAGCCACGTCTCTGTCTCTGAAGGAGCCCTGGTTCTGCTGAGGTGCAA
CTACTCATCGTCTGTTCCACCATATCTCTTCTGGTATGTGCAATACCCCAACCAAGGACTCCAG
CTTCTCCTGAAGTACACATCAGCGGCCACCCTGGTTAAAGGCATCAACGGTTTTGAGGCTGAAT
TTAAGAAGAGTGAAACCTCCTTCCACCTGACGAAACCCTCAGCCCATATGAGCGACGCGGCTGA
GTACTTCTGTGCTGTGAGTGATCTCGAACCGAACAGCAGTGCTTCCAAGATAATCTTTGGATCA
GGGACCAGACTCAGCATCCGGCCAAATATCCAGAACCCTGACCCTGCCGTGTACCAGCTGAGAG
ACTCTAAATCCAGTGACAAGTCTGTCTGCCTATTCACCGATTTTGATTCTCAAACAAATGTGTC
ACAAAGTAAGGATTCTGATGTGTATATCACAGACAAAACTGTGCTAGACATGAGGTCTATGGAC
TTCAAGAGCAACAGTGCTGTGGCCTGGAGCAACAAATCTGACTTTGCATGTGCAAACGCCTTCA
ACAACAGCATTATTCCAGAAGACACCTTCTTCCCCAGCCCAGAAAGTTCCTGTGATGTCAAGCT
GGTCGAGAAAAGCTTTGAAACAGATACGAACCTAAACTTTCAAAACCTGTCAGTGATTGGGTTC
CGAATCCTCCTCCTGAAAGTGGCCGGGTTTAATCTGCTCATGACGCTGCGGCTGTGGTCCAGCT
GAGATCTGCAAGATTGTAAGACAGCCTGTGCTCCCTCGCTCCTTCCTCTGCATTGCCCCTCTTC
TCCCTCTCCAAACAGAGGGAACTCTCCTACCCCCAAGGAGGTGAAAGCTGCTACCACCTCTGTG
CCCCCCCGGTAATGCCACCAACTGGATCCTACCCGAATTTATGATTAAGATTGCTGAAGAGCTG
CCAAACACTGCTGCCACCCCCTCTGTTCCCTTATTGCTGCTTGTCACTGCCTGACATTCACGGC
AGAGGCAAGGCTGCTGCAGCCTCCCCTGGCTGTGCACATTCCCTCCTGCTCCCCAGAGACTGCC
TCCGCCATCCCACAGATGATGGATCTTCAGTGGGTTCTCTTGGGCTCTAGGTCCTGGAGAATGT
TGTGAGGGGTTTATTTTTTTTTAATAGTGTTCATAAAGAAATACATAGTATTCTTCTTCTCAAG
ACGTGGGGGGAAATTATCTCATTATCGAGGCCCTGCTATGCTGTGTGTCTGGGCGTGTTGTATG
TCCTGCTGCCGATGCCTTCATTAAAATGATTTGGAA.

[0200] As used herein, the terms “treat,” treating,” “treatment,” and the like refer to reducing or ameliorating a disorder and/or symptoms associated therewith or obtaining a desired pharmacologic and/or physiologic effect. It will be appreciated that, although not precluded, treating a disorder or condition does not require that the disorder, condition or symptoms associated therewith be completely eliminated. In some embodiments, the effect is therapeutic, i.e., without limitation, the effect partially or completely reduces, diminishes, abrogates, abates, alleviates, decreases the intensity of, or cures a disease and/or adverse symptom attributable to the disease. In some embodiments, the effect is preventative, i.e., the effect protects or prevents an occurrence or reoccurrence of a disease or condition. To this end, the presently disclosed methods comprise administering a therapeutically effective amount of a composition as described herein.

[0201] By “uracil glycosylase inhibitor” or “UGI” is meant an agent that inhibits the uracil-excision repair system. Base editors comprising a cytidine deaminase convert cytosine to uracil, which is then converted to thymine through DNA replication or repair. Including an inhibitor of uracil DNA glycosylase (UGI) in the base editor prevents base excision repair which changes the U back to a C. An exemplary UGI comprises an amino acid sequence as follows:
[0202] >sp1P14739IUNGI_BPPB2 Uracil-DNA glycosylase inhibitor

(SEQ ID NO: 231)
MTNLSDIIEKETGKQLVIQESILMLPEEVEEVIGNKPESDILVHTAYDE
STDENVMLLTSDAPEYKPWALVIQDSNGENKIKML.

[0203] The term “vector” refers to a means of introducing a nucleic acid sequence into a cell, resulting in a transformed cell. Vectors include plasmids, transposons, phages, viruses, liposomes, and episome. “Expression vectors” are nucleic acid sequences comprising the nucleotide sequence to be expressed in the recipient cell. Expression vectors may include additional nucleic acid sequences to promote and/or facilitate the expression of the of the introduced sequence such as start, stop, enhancer, promoter, and secretion sequences.

[0204] Ranges provided herein are understood to be shorthand for all of the values within the range. For example, a range of 1 to 50 is understood to include any number, combination of numbers, or sub-range from the group consisting 1, 2, 3, 4, 5, 6, 7, 8, 9, 10, 11, 12, 13, 14, 15, 16, 17, 18, 19, 20, 21, 22, 23, 24, 25, 26, 27, 28, 29, 30, 31, 32, 33, 34, 35, 36, 37, 38, 39, 40, 41, 42, 43, 44, 45, 46, 47, 48, 49, or 50.

[0205] The recitation of a listing of chemical groups in any definition of a variable herein includes definitions of that variable as any single group or combination of listed groups. The recitation of an embodiment for a variable or aspect herein includes that embodiment as any single embodiment or in combination with any other embodiments or portions thereof.

[0206] All terms are intended to be understood as they would be understood by a person skilled in the art. Unless defined otherwise, all technical and scientific terms used herein have the same meaning as commonly understood by one of ordinary skill in the art to which the disclosure pertains.

[0207] In this application, the use of the singular includes the plural unless specifically stated otherwise. It must be noted that, as used in the specification, the singular forms “a,” “an” and “the” include plural referents unless the context clearly dictates otherwise. In this application, the use of “or” means “and/or” unless stated otherwise. Furthermore, use of the term “including” as well as other forms, such as “include”, “includes,” and “included,” is not limiting.

[0208] As used in this specification and claim(s), the words “comprising” (and any form of comprising, such as “comprise” and “comprises”), “having” (and any form of having, such as “have” and “has”), “including” (and any form of including, such as “includes” and “include”) or “containing” (and any form of containing, such as “contains” and “contain”) are inclusive or open-ended and do not exclude additional, unrecited elements or method steps. It is contemplated that any embodiment discussed in this specification can be implemented with respect to any method or composition of the present disclosure, and vice versa. Furthermore, compositions of the present disclosure can be used to achieve methods of the present disclosure.

[0209] The term “about” or “approximately” means within an acceptable error range for the particular value as determined by one of ordinary skill in the art, which will depend in part on how the value is measured or determined, i.e., the limitations of the measurement system. For example, “about” can mean within 1 or more than 1 standard deviation, per the practice in the art. Alternatively, “about” can mean a range of up to 20%, up to 10%, up to 5%, or up to 1% of a given value. Alternatively, particularly with respect to biological systems or processes, the term can mean within an order of magnitude, e.g., within 5-fold, within 2-fold of a value. Where particular values are described in the application and claims, unless otherwise stated, the term “about” means within an acceptable error range for the particular value should be assumed.

[0210] Reference in the specification to “some embodiments,” “an embodiment,” “one embodiment” or “other embodiments” means that a particular feature, structure, or characteristic described in connection with the embodiments is included in at least some embodiments, but not necessarily all embodiments, of the present disclosures.

### BRIEF DESCRIPTION OF THE DRAWINGS

[0211] FIG. 1 is a schematic depicting the hypoxic and adenosinergic pathways. As depicted in FIG. 1, the two pathways are intertwined and pay synergistic roles in suppressing T cells in the tumor microenvironment.

[0212] FIGS. 2A and 2B present schematics depicting the role of hypoxic and adenosinergic pathways in suppressing T cells in the tumor microenvironment. As shown in FIGS. 2A and 2B, adenosine receptor antagonists alleviate T cell immunosuppression in the tumor microenvironment.

[0213] FIG. 3 provides a graph depicting next generation sequencing-based (NGS) measurements of editing at A2AR, HIF1α (alternatively referred to as HIF1α), and A2BR target sites in CAR-T cells using guides for CBE (g145, g222), ABE (g155, g170, g173, g221), and Cas9 (A2A Cas9, A2B Cas9). Electroporation only (EP) was used as a control. High molecular editing (i.e., base editing efficiencies>90%) was seen across all guides at every target site in the CAR-T cells.

[0214] FIGS. 4A-4C provide flow cytometry graphs and bar graphs. FIGS. 4A and 4B depict CAR expression after editing A2A, HIF1α, and A2B target sites in CAR-T cells using guides. FIG. 4A provides flow cytometry graphs depicting CAR expression controls for electroporation (EP) only and untransduced (UTD) CAR-T cells. FIG. 4B are flow cytometry graphs depicting CAR expression of edited A2AR target sites using guides g145, g155, and Cas9 (top), edited HIF1α target sites using guides g168, g170, and g173 (middle), and edited A2B target sites using guides g221, g222, and Cas9 (bottom). FIG. 4C is a bar graph quantifying the CAR expression observed in the flow cytometry graphs of FIG. 4B. Consistent 60% CAR expression was seen across all guides and editing targets. There was no observed impact of editing on CAR expression.

[0215] FIG. 5 is a bar graph depicting next generation sequencing-based (NGS) measurements of editing at HIF1α target sites in CAR-T cells using guide RNAs for CBE (sgRNA162, sgRNA163) and ABE (sgRNA158, sgRNA168, sgRNA169, sgRNA170, sgRNA171, sgRNA172, sgRNA173). Electroporation (EP) only was used as a control. Next generation sequencing (NGS) showed high molecular editing (i.e., high base editing efficiencies) for three guides (see arrows in FIG. 5).

[0216] FIG. 6A-6D are scatter plots depicting the expression of HIF1α using RNA sequencing (RNA-seq). Untreated cells were compared to cells treated with guides 158, 170 and 173. m1 (H1F1a missense mutation control) was used as a control. RNAseq indicated a decrease in HIF1α mRNA in two of the guide candidates (Guide 170 and Guide 173).

[0217] FIG. 7 is a schematic depicting an exemplary target sequence for base editing HIF1α isoform 3 (HIF1α.I3). The sequences in order of occurrence from top-to-bottom in FIG. 7 are provided in the Sequence Listing as SEQ ID NOs: 381 and 382. The lower sequence shown in FIG. 7 is the reverse complement of SEQ ID NO. 381.

[0218] FIGS. 8A-8B provide schematics showing that the HIF1α guide RNAs (Guide 170 and Guide 173) target different intron/exon splice sites across the HIF1α gene (SEQ ID NO: 377). Targeting conserved sequences at intron-exon boundaries results in improper splicing, which led to effective protein knockout.

[0219] FIGS. 9A and 9B provide schematics depicting the evaluation of gene-splicing sites resulting from editing of the HIF1α gene using Guides 170 and 173. Significant intron retention was observed. More robust editing was observed with Guide 173, which is an observation consistent with this guide being the top HIF1α guide RNA. The sequences shown in FIGS. 9A and 9B in order of occurrence correspond to SEQ ID NOs: 383 and 384.

[0220] FIG. 10 provides bar graphs depicting IFNγ production (pg/mL) after EGFR CAR-Ts with HIF1α edits were co-cultured at 1 to 1 E:T ratio with either SKOV3 or H226 cells in 1% O₂ for 48 hours. HIF1α was edited using guides g170 and g173. Electroporation (EP) only was used as a control. EGFR CAR-T cells with HIF1α knockout edits produced more cytokine under hypoxic stress than unedited EGFR CAR-T cells.

[0221] FIG. 11 provides a schematic depicting the effect of hypoxia on cytotoxic T cell function via HIF1α, cAMP and pCREB signaling. Not being bound by theory, the hypoxia-adenosinergic axis suppresses cytotoxic T cell function via HIF1α, cAMP and pCREB signaling.

[0222] FIG. 12 provides a schematic showing that A2A and A2B adenosine receptor subtypes both play an inhibitory role in suppressing T cell function. Without being bound by theory, A2A is the high affinity inhibitory adenosine receptor, and A2B is the low affinity inhibitory adenosine receptor.

[0223] FIG. 13 provides a bar graph depicting next generation sequencing-based (NGS) measurements of editing at A2AR target sites in CAR-T cells using guide RNAs for CBE (sgRNA144, sgRNA145, sgRNA146, sgRNA147, sgRNA148, sgRNA149, sgRNA150, sgRNA151, sgRNA152, sgRNA153, sgRNA154, sgRNA155) and ABE (sgRNA155). Electroporation (EP) only was used as a control.

[0224] FIG. 14 provides histograms depicting expression of pCREB in A2AR knockout T cells using guides g145 and g155. Cas9 and Electroporation (EP) only were used as controls. In the plots, the darker-grey histogram corresponds to DMSO and the lighter-grey histogram corresponds to 30 μM CADO. A2AR knockout abrogated adenosine signaling resulting in no upregulation of downstream pCREB. Throughout the figures, the term “CADO” represents 2-chloroadenosine.

[0225] FIG. 15 presents bar graphs depicting IFNγ production after 48 hours in A2AR knockout T cells using guides g145 and g155. The data shown in FIG. 15 is normalized to IFNγ production in 0 μM CADO (DMSO only treatment). A2A knockout protected CAR-T cells from adenosine-mediated cytokine suppression.

[0226] FIG. 16 provides a bar graph depicting next generation sequencing-based (NGS) measurements of editing at A2BR target sites in CAR-T cells using guide RNAs for CBE (sgRNA222, sgRNA223, sgRNA225, sgRNA226) and ABE (sgRNA221, sgRNA224). Cas9 and Electroporation (EP) only were used as controls. The gRNA screen revealed two top guides with >95% editing.

[0227] FIGS. 17A-17C provide graphs showing tumor volume plotted as a function of time in mice administered 2×10⁶, 4×10⁶, or 8×10⁶ edited anti-EGFR CAR T cells having an adenosine receptor (A2AR) knock-out, control anti-EGFR CAR T cells expressing the adenosine receptor, or untransduced (UTD) control cells. The anti-EGFR CAR T cells were adenosine-resistant CAR-T cell (ARC T cells), which are T cells with expression of TCR, HLA Class I, HLA Class II, and A2AR knocked out. The ARC T cells demonstrated robust, dose-dependent anti-tumor efficacy compared to unedited CAR-T cells in a subcutaneous xenograft tumor model (H226 lung carcinoma) in NCG mice.

[0228] FIGS. 18A-18C provide schematics. FIG. 18A provides a schematic showing how signaling through A2A adenosine receptors (A2AR) on T cells can significantly inhibit effector functions, including cytokine selection and anti-tumor cytotoxicity. FIGS. 18B and 18C provide schematics showing how an adenosine base editor binds to target DNA to expose a narrow editing window and deaminate an adenosine base to produce inosine, which is read as G by DNA polymerase.

[0229] FIGS. 19A-19D provide bar graphs, flow cytometry scatter plots, and a schematic showing highly efficient base editing and preparation of adenosine-resistant CAR-T cells (ARC T cells). FIG. 19A provides a bar graph showing base editing of the ADORA2A gene quantified via next generation sequencing (NGS). FIG. 19B provides a bar graph presenting flow cytometry data showing reduction of cell surface protein, thereby confirming allogeneic gene editing. FIG. 19C provides a set of three flow cytometry scatter plots showing high expression of an EGFR-specific CAR in primary human T cells detected with anti-CAR idiotype antibody. FIG. 19D provides a schematic providing an overview of a process for generating multiplex base edited EGFR-targeting ARC T cells. In FIG. 19B, each set of three bars correspond to, from left-to-right, TCR, HLA Class I, and HLA Class II. In FIGS. 19A-19D, “Base Editing Guide 1” (BE2) indicates cells edited using the base editor ABE8.20 in combination with the guide sgRNA145 (see Table 1A), “Base Editing Guide 2” (BE2) indicates cells edited using the base editor ABE8.20 in combination with the guide sgRNA155, and “CRISPR Guide” indicates cells edited using a CRISPR guide and editor known to be effective in knocking out expression of A2AR.

[0230] FIGS. 20A-20E provide flow cytometry histograms, bar graphs, a plot, and images showing adenosine-resistant CAR-T cells (CAR-T cells) were protected from adenosine-mediated suppression in vitro. FIG. 20A provides flow cytometry histograms showing downstream signaling of A2AR (light grey curves) was prevented in ARC T cells, as indicated by a reduction in phosphorylated CREB staining. FIG. 20B provides a bar graph showing that adenosine-resistant CAR-T cells (ARC T) maintained capacity to produce interferon-gamma (IFNγ) in the presence of extracellular adenosine. FIG. 20C shows live cell images of GFP+H226 spheroids treated with untransduced (UTD) T cells or EGFR-targeted CAR-T or ARC T cells 9 days after co-culture. FIG. 20D provides a plot showing that EGFR-targeted ARC T cells retained cytotoxicity against tumor spheroids in the presence of exogenous adenosine. H266 cells expressing GFP were plated in ultra-low adherent 96-well plates and incubated at 36° C. for 3 days to allow for spheroid formation. Then, untransduced cells (UTD), ARC T cells, or CAR T cells expressing TCR, HLA Class I, HLA Class II, and ADAR were added to the wells at a 1:2 effector to target ratio (E:T) with 0 μM adenosine. Plates were then placed in an Incucyte live imaging analysis instrument and cytotoxicity was measured via reduction in GFP+ spheroid volume over time. FIG. 20E provides a bar graph showing quantification of ARC T cell cytotoxicity from the assay shown in FIGS. 20C and 20D. In FIGS. 19A-19D, “BE KO1” indicates cells edited using the base editor ABE8.20 in combination with the guide sgRNA145 (see Table 1A), “BE KO2” indicates cells edited using the base editor ABE8.20 in combination with the guide sgRNA155, and “CRISPR KO” indicates cells edited using a CRISPR guide and editor known to be effective in knocking out expression of A2AR.

[0231] FIGS. 21A and 21B provide a schematic and images showing that adenosine-resistant CAR-T cells (ARC T cells) exhibited superior anti-tumor activity in vivo. FIG. 21A provides a schematic showing the experimental schema to test ARC T cell functionality in NCG xenograft mice. FIG. 21B shows ex vivo immunofluorescent staining of hypoxia and adenosine-producing ectoenzyme CD73 in the tumor microenvironment (TME).

[0232] FIG. 22 provides a flow cytometry histogram showing phosphor SMAD2/3 (pSMAD2/3) expression in controls. The pSMAD assay was completed to determine functional TGFbR signaling. T cells were stimulated with 100 ng/mL of rhTGFb1 or DMSO for 20 mins at 37° C. Cells were then fixed and permeabilized and stained with phosphor-SMAD2/3 antibody. In FIG. 22, the darker-shaded curve corresponds to cells treated with DMSO and the lightly-shaded curve corresponds to cells contacted with 10 ng/mL TGFb1 for 20 minutes. TGFbR signaling was determined via upregulation of pSMAD 2/3 protein.

[0233] FIG. 23 provides a collection of flow cytometry histograms showing phosphor-SMAD2/3 (pSMAD2/3) expression in T cells base edited using the base editors (i.e., ABE) or nuclease (i.e., Cas12b) listed to the left of each row of plots in combination with the indicated guides (e.g., g258; guide spacer sequences are provided in Table 1i), which are listed in each corresponding plot. Stars indicate plots corresponding to base edited cells that showed reduced pSMAD2/3 signaling in the presence of 10 ng/mL TGFb1. The pSMAD2/3 expression assays were conducted as described for FIG. 22. TGFbR knock-out (KO) was confirmed by a reduction in pSMAD2/3 signaling. In FIG. 23, the lightly-shaded curves correspond to edited cells and the darkly-shaded curves correspond to unedited cells.

[0234] FIG. 24 provides a series of flow cytometry histograms showing a comparison of TGFbR knockout guides in a cytokine suppression assay. Cells were contacted with dimethyl sulfoxide (DMSO) and measurements were made to determine background levels of phosphor-SMAD (pSMAD) signaling. Unedited cells were stimulated with 100 ng/mL TGFb1 for 20 mins as a control to show upregulation of pSMAD2/3 (dark-grey shaded curves). Cells edited using the guide polynucleotide g260, g262, g272, or g273 (guide spacer sequences are provided in Table 1B) in combination with an editor showed varying levels of TGFbR knock-out (KO), as shown by reduction of pSMAD signaling. In FIG. 24, all of the plots contain the same curves corresponding to unedited cells and cells contacted with DMSO, so that the location of the curves corresponding to the unedited cells and the cells contacted with DMSO are the same across all of the plots.

[0235] FIG. 25 provides a set of flow cytometry scatter plots showing chimeric antigen receptor expression in EGFR-targeting CAR-T cells edited to knock out expression of the indicated polypeptides (i.e., A2AR, PD1, TGFbRII, or combinations thereof). At the end of culturing, T cells were stained with an anti-idiotype antibody. No differences were observed in CAR expression across various edits. ADAR expression was knocked out using the guide TSBTx2043, PD1 expression was knocked out using the guide TSBTx025, TGFbR expression was knocked out using the guide TSBTx5277, and “Triple KO” cells were editing using all three guides (see Table 1B).

[0236] FIGS. 26A-26C provide a flow cytometry scatter plot and bar graphs demonstrating high efficiency base editing of an HIF-1a isoform 3 polynucleotide (HIF1,3) in EGFR-targeting chimeric antigen receptor (CAR) T cells using the guide polynucleotide TSBTx4470 in combination with an adenosine base editor (ABE). The base editing resulted in knock-out of the HIF-1a isoform 3 gene in the cells. FIG. 26A provides flow cytometry scatter plots showing that T cells obtained from two donors (Donor 1; Donor 2) were effectively transduced with a polynucleotide encoding a chimeric antigen receptor (CAR) targeting EGFR and surface-expressed the CAR. FIG. 26B provides a bar graph showing base editing efficiencies measured in T cells from Donors 1, 2, and 3 that were base edited using the guide polynucleotide TSBTx4470, which targeted an HIF-1a isoform 3 polynucleotide (HIF1,3), and an adenosine base editor (ABE8.20). FIG. 26C provides bar graphs showing levels of the indicated cytokines (GM-CSF, IL-2, TNF-alpha, INF-gamma) produced by EGFR-targeting T cells base edited to knock out expression of HIF-1a isoform 3 when co-cultured with H226 tumor cells at an effector to target ratio of 1:2 for 48 hours in normoxia (20% oxygen) or hypoxia (1% oxygen) conditions. Cytokine levels were measured using an enzyme-linked immunosorbent assay. The base edited CAR T cells showed superior cytokine secretion relative to EGFR-targeting CAR T cells that were not base edited. In FIG. 26C, “CAR” refers to EGFR-targeting CAR T cells that were not base edited to knock-out expression of HIF-1a isoform 3 and “1,3 KO” refers to EGFR-targeting CAR T cells that were base edited to knock out expression of HIF-1a isoform 3.

[0237] FIG. 27 provides a plot showing tumor volume in mice administered about 5e6 H226 cells subcutaneously and subsequently intravenously administered 2e6 of the indicated anti-EGFR CAR T cells once H226 tumors reached a volume, on average, of about 150 mm³. In FIG. 27, “Control” indicates mice administered no CAR T cells, “CAR” indicates anti-EGFR CAR T cells base edited to knock-out expression of CD3e (CD3ε), B2M, and CIITA, “A2AR” indicates anti-EGFR CAR T cells base edited to knock-out expression of CD3ε, B2M, CIITA, and A2AR, and “TKO” indicates anti-EGFR CAR T cells base edited to knock-out expression of CD3ε, B2M, CIITA, A2AR, TGFbR2, and PD1. TGFbR2 was knocked-out using the guide polynucleotide TSBTx5277 in combination with Cas12b. Knock-out of all other targets (A2AR, CD3ε, B2M, CIITA, and PD1) was carried out using base editing. A2AR was base edited using ABE8.20 in combination with the guide polynucleotide TSBTx2043. CD3ε was base edited using ABE8.20 in combination with the guide polynucleotide TSBTx4073. B2M was base edited using ABE8.20 in combination with the guide polynucleotide TSBTx760. CIITA was base edited using ABE8.20 in combination with the guide polynucleotide TSBTx763. PD1 was base edited using ABE8.20 in combination with the guide polynucleotide TSBTx025.

[0238] FIG. 28 provides a plot showing tumor volume in mice administered H226 cells subcutaneously and subsequently administered 4e6 of the indicated anti-EGFR CAR T cells. In FIG. 28, “Control” indicates mice administered no CAR T cells, “CAR” indicates anti-EGFR CAR T cells base edited to knock-out expression of CD3ε, B2M, and CIITA, “A2AR” indicates anti-EGFR CAR T cells base edited to knock-out expression of CD3ε, B2M, CIITA, and A2AR, and “TKO” indicates anti-EGFR CAR T cells base edited to knock-out expression of CD3ε, B2M, CIITA, A2AR, TGFbR2, and PD1. TGFbR2 was knocked-out using the guide polynucleotide TSBTx5277 in combination with Cas12b. Knock-out of all other targets (A2AR, CD3ε, B2M, CIITA, and PD1) was carried out using base editing. A2AR was base edited using ABE8.20 in combination with the guide polynucleotide TSBTx2043. CD3ε was base edited using ABE8.20 in combination with the guide polynucleotide TSBTx4073. B2M was base edited using ABE8.20 in combination with the guide polynucleotide TSBTx760. CIITA was base edited using ABE8.20 in combination with the guide polynucleotide TSBTx763. PD1 was base edited using ABE8.20 in combination with the guide polynucleotide TSBTx025.

### DETAILED DESCRIPTION OF THE INVENTION

[0239] The invention features genetically modified immune cells (e.g., T- or NK-cells), and methods for producing and using these modified immune cells (e.g., T cells, NK cells, or macrophages).

[0240] The invention is based, at least in part, on the discovery that generating base edits in one or more genes encoding proteins that function in or regulate hypoxic and adenosinergic pathways (e.g., A2AR, A2BR, HIF1α, HIF1α.I3 in an immune cell (e.g., T- or NK-cell) increases resistance to hypoxic-adenosinergic immunosuppression. The modification of immune cells (e.g., T- or NK-cells) to reduce the expression of A2AR, A2BR, HIF1α, HIF1α.I3 polypeptides and/or polynucleotides is accomplished using a base editor system as described herein.

### Car-T Cell Therapies

[0241] Base editors (BEs) are a class of emerging gene editing reagents that enable highly efficient, user-defined modification of target genomic DNA without the creation of double-stranded breaks (DSBs). In contrast to a nuclease-only editing strategy, concurrent modification of one or more genetic loci by base editing produces highly efficient gene knockouts with no detectable translocation events. Multiplex editing of genes is likely to be useful in the creation of CAR-T cell therapies with improved therapeutic properties. The methods described herein address known limitations of immune cell (e.g., CAR-T cell) products and are a promising development towards the next generation of precision cell-based therapies.

[0242] The present invention provides modified immune cells (e.g., T- or NK-cells) that have increased resistance to hypoxia-adenosinergic immunosuppression. In some embodiments, the modified immune cell described herein is a modified CAR-T cell. In some embodiments, the CAR-T cell is a T cell that expresses a desired CAR, and can be universally applicable, irrespective of the donor and the recipient's immunogenic compatibility. An immune cell may be derived from one or more subjects or donors. In certain embodiments, the immune cell is derived from a single human subject or donor. For example, the T cell may be derived from PBMCs of a single healthy human donor. In certain embodiments, the immune cell is derived from multiple human donors. In some embodiments, the immune cell is derived from a subject with a disease or disorder (e.g., solid tumor).

[0243] In some embodiments, an immune cell (e.g., T- or NK-cell) may be generated, as described herein by using gene modification to introduce concurrent edits at one or more genetic loci. A modification, or concurrent modifications as described herein may be a genetic editing, such as a base editing, generated by a base editor. The base editor may be a C base editor or A base editor. As is discussed herein, base editing may be used to achieve a gene disruption, such that the gene is not expressed. A modification by base editing may be used to achieve a reduction in gene expression. In some embodiments base editor may be used to introduce a genetic modification such that the edited gene does not generate a structurally or functionally viable protein product. In some embodiments, a modification, such as the concurrent modifications described herein may comprise a genetic editing, such as base editing, such that the expression or functionality of the gene product is altered in any way. For example, the expression of the gene product may be enhanced or upregulated as compared to baseline expression levels. In some embodiments the activity or functionality of the gene product may be upregulated as a result of the base editing, or multiple base editing events acting in concert. In some embodiments, a base editor and sgRNAs that provide for multiplex editing are introduced in a single electroporation event, thereby reducing electroporation event associated toxicity. Any known methods for incorporation of exogenous genetic material into a cell may be used to replace electroporation, and such methods known in the art are contemplated for use in any of the methods described herein.

[0244] The present invention provides an alternative means of producing modified immune cells (e.g., T- or NK-cells) by using base editing technology to increase resistance to hypoxia-adenosinergic immunosuppression. In some embodiments, at least one or more genes (e.g., A2AR, A2BR, HIF1α, HIF1α.I3), or regulatory elements thereof, are modified in an immune cell (e.g., T- or NK-cell) with the base editing compositions and methods provided herein. In some embodiments, the base editor alters a polynucleotide encoding a polypeptide (e.g., A2AR, A2BR, HIF1α, and/or HIF1α.I3) that functions in or regulates a hypoxic and/or adenosinergic pathways.

[0245] In some embodiments, the immune cell (or immune cell equivalent) is obtained from a immune precursor cell (e.g., an induced pluripotent stem cell (iPSC) or an embryonic stem cell (ESC)). In some embodiments, the immune precursor cell is modified by the methods disclosed herein to produce the modified immune cells disclosed herein.

[0246] The modified immune cells and methods provided herein address known limitations of CAR-T therapy and is a promising development towards the next generation of precision cell-based therapies.

### Modified Immune Cells

[0247] The disclosure provides immune cells (e.g., T- or NK-cells) modified using nucleobase editors described herein. The modified immune cells may express chimeric antigen receptors (CARs) (e.g., CAR-T cells). Modification of immune cells to express a chimeric antigen receptor can enhance an immune cell's immunoreactive activity, wherein the chimeric antigen receptor has an affinity for an epitope on an antigen, wherein the antigen is associated with an altered fitness of an organism. For example, the chimeric antigen receptor can have an affinity for an epitope on a protein expressed in a diseased cell. Because the CAR-T cells can act independently of major histocompatibility complex (MHC), activated CAR-T cells can kill the diseased cell expressing the antigen. The direct action of the CAR-T cell evades defensive mechanisms that have evolved in response to MHC presentation of antigens to immune cells.

[0248] In an embodiment, the invention provides T cells that have been altered according to the methods provided herein to reduce or eliminate expression of one or more of the following polypeptides: HIF1α, A2AR, PD1, CTLA4, LAG3, TIM3, TGFbetaR1, TGFbetaR2, HIF1α, and A2AR. In an embodiment, the invention provides T cells that have been altered according to the methods provided herein to reduce or eliminate expression of one or more of the following polypeptides: CD3ε, B2M, CIITA. In an embodiment, the invention provides T cells that have been altered according to the methods provided herein to reduce or eliminate expression of one or more of the following polypeptides: CD3ε, B2M, CIITA, A2AR. In an embodiment, the invention provides T cells that have been altered according to the methods provided herein to reduce or eliminate expression of one or more of the following polypeptides: CD3ε, B2M, CIITA, A2AR, TGFbR2, PD1. In some cases, the T cells have been altered according to the methods provided herein to reduce or eliminate expression of HIF1α and A2AR. In some embodiments, the invention provides T cells that have been altered according to the methods provided herein to reduce or eliminate expression of one or more of the following polypeptides: CD3ε, CD3δ, CD3γ, B2M, CIITA, TRAC, or TRBC. In some cases, the invention provides T cells that have been altered according to the methods provided herein to reduce or eliminate expression of one or more of HIF1a, A2AR, PD1, CTLA4, LAG3, TIM3, TGFbetaR1, TGFbetaR2, dual HIF1α/A2AR and, additionally, to reduce or eliminate expression of one or more of CD3ε, CD3δ, CD3γ, B2M, CIITA, TRAC, or TRBC. In various instances, the invention provides T cells that over-express HLA-E and/or HLA-G. In some cases, the invention provides T cells have been altered according to the methods provided herein to reduce or eliminate expression of HLA Class I polypeptides, HLA Class II polypeptides, and TCR. The present disclosure also provides methods for producing such T cells.

[0249] Some embodiments comprise autologous immune cell immunotherapy, wherein immune cells are obtained from a subject having a disease or altered fitness characterized by cancerous or otherwise altered cells expressing a surface marker. The obtained immune cells are genetically modified to express a chimeric antigen receptor and are effectively redirected against specific antigens. Thus, in some embodiments, immune cells are obtained from a subject in need of CAR-T immunotherapy. In some embodiments, these autologous immune cells are cultured and modified shortly after they are obtained from the subject. In other embodiments, the autologous cells are obtained and then stored for future use. This practice may be advisable for individuals who may be undergoing parallel treatment that will diminish immune cell counts in the future.

[0250] Some embodiments comprise allogeneic immune cell immunotherapy. In allogeneic immune cell immunotherapy, immune cells are obtained from a donor other than the subject who will be receiving treatment. In some embodiments, immune cells are obtained from a healthy subject or donor and are genetically modified to express a chimeric antigen receptor and are effectively redirected against specific antigens. The immune cells, after modification to express a chimeric antigen receptor (CAR), are administered to a subject for treating a disease. In some embodiments, immune cells to be modified to express a chimeric antigen receptor (CAR) can be obtained from pre-existing stock cultures of immune cells.

[0251] Immune cells and/or immune effector cells can be isolated or purified from a sample collected from a subject or a donor using standard techniques known in the art. For example, immune effector cells can be isolated or purified from a whole blood sample by lysing red blood cells and removing peripheral mononuclear blood cells by centrifugation. The immune effector cells can be further isolated or purified using a selective purification method that isolates the immune effector cells based on cell-specific markers such as CD25, CD3, CD4, CD8, CD28, CD45RA, or CD45RO. In one embodiment, CD4⁺ is used as a marker to select T cells. In one embodiment, CD8⁺ is used as a marker to select T cells. In one embodiment, CD4⁺ and CD8⁺ are used as a marker to select regulatory T cells.

[0252] In another embodiment, the invention provides T cells that have targeted gene knockouts at the TCR constant region (TRAC), which is responsible for TCRαβ surface expression. TCRαβ-deficient CAR T cells are compatible with allogeneic immunotherapy (Qasim et al., Sci. Transl. Med. 9, eaaj2013 (2017); Valton et al., Mol Ther. 2015 September; 23(9): 1507-1518). If desired, residual TCRαβ T cells are removed using CliniMACS magnetic bead depletion to minimize the risk of GVHD. In another embodiment, the invention provides donor T cells selected ex vivo to recognize minor histocompatibility antigens expressed on recipient hematopoietic cells, thereby minimizing the risk of graft-versus-host disease (GVHD), which is the main cause of morbidity and mortality after transplantation (Warren et al., Blood 2010; 115(19):3869-3878).

[0253] Another technique for isolating or purifying immune effector cells is flow cytometry. In fluorescence activated cell sorting a fluorescently labelled antibody with affinity for an immune effector cell marker is used to label immune effector cells in a sample. A gating strategy appropriate for the cells expressing the marker is used to segregate the cells. For example, T lymphocytes can be separated from other cells in a sample by using, for example, a fluorescently labeled antibody specific for an immune effector cell marker (e.g., CD4, CD8, CD28, CD45) and corresponding gating strategy. In one embodiment, a CD4 gating strategy is employed. In one embodiment, a CD8 gating strategy is employed. In one embodiment, a CD4 and CD8 gating strategy is employed. In some embodiments, a gating strategy for other markers specific to an immune effector cell is employed instead of, or in combination with, the CD4 and/or CD8 gating strategy.

[0254] In some embodiments, the immune effector cells contemplated in the invention are effector T cells. In some embodiments, the effector T cell is a naïve CD8⁺ T cell, a cytotoxic T cell, a natural killer T (NKT) cell, a natural killer (NK) cell, or a regulatory T (Treg) cell. In some embodiments, the effector T cells are thymocytes, immature T lymphocytes, mature T lymphocytes, resting T lymphocytes, or activated T lymphocytes. In some embodiments the immune effector cell is a CD4⁺CD8⁺ T cell or a CD4⁻ CD8⁻ T cell. In some embodiments the immune effector cell is a T helper cell. In some embodiments the T helper cell is a T helper 1 (Th1), a T helper 2 (Th2) cell, or a helper T cell expressing CD4 (CD4+ T cell). In some embodiments, immune effector cells are effector NK cells. In some embodiments, the immune effector cell is any other subset of T cells. The modified immune effector cell may express, in addition to the chimeric antigen receptor (CAR), an exogenous cytokine, a different chimeric receptor, or any other agent that would enhance immune effector cell signaling or function. For example, co-expression of the chimeric antigen receptor and a cytokine may enhance the CAR-T cell's ability to lyse a target cell.

[0255] Chimeric antigen receptors (CARs) as contemplated in the present invention may comprise an extracellular binding domain, a transmembrane domain, and an intracellular domain. Binding of an antigen to the extracellular binding domain can activate the CAR-T cell and generate an effector response, which includes CAR-T cell proliferation, cytokine production, and other processes that lead to the death of the antigen expressing cell. Exemplary CARs include those described in the following publications: WO 2020/168300 A1; WO 2020/150534; Li, et al., “Improving the anti-solid tumor efficacy of CAR-T cells by inhibiting adenosine signaling pathway,” Oncoimmunology, 9:e1824643 (2020), DOI: 10.1080/2162402X.2020.1824643; Masoumi, et al., “Genetic and pharmacological targeting of A2a receptor improves function of anti-mesothelin CAR T cells,” Journal of Experimental & Clinical Cancer Research, 39:49 (2020), DOI: 10.1186/s13046-020-01546-6; Xia, et al. “EGFR-targeted CAR-T cells are potent and specific in suppressing triple-negative breast cancer both in vitro and in vivo,” Clinical and Translational Immunology, e1135 (2020), DOI: 10.1002/cti2.1135; Zhou, et al., “Cellular Immunotherapy for Carcinoma Using Genetically Modified EGFR-Specific T-lymphocytes,” NeoPlasia, 15:544-553 (2013), DOI: 10.1593/neo.13168; Li, et al., “Antitumor activity of EGFR-specific CAR T cells against non-small-cell lung cancer cells in vitro and in mice,” Cell Death and Disease, 9:177 (2018), DOI: 10.1038/s41419-017-0238-6; Liu, et al., “Anti-EGFR chimeric antigen receptor-modified T cells in metastatic pancreatic carcinoma: A phase I clinical trial,” Cytotherapy, 22:573-580 (2020), DOI: 10.1016/j.jcyt.2020.04.088; Guo, et al., “Phase I Study of Chimeric Antigen Receptor-Modified T Cells in Patients with EGFR-Positive Advanced Biliary Tract Cancers,” Clinical Cancer Research, 24:1277-1286 (2017), DOI: 10.1158/1078-0432.CCR-17-0432; the entire contents of each of which are incorporated herein in their entireties by reference for all purposes.

[0256] In some embodiments of the present invention, the chimeric antigen receptor further comprises a linker. In some embodiments, the linker is a (GGGGS)ₙ linker (SEQ ID NO: 247). In some embodiments, the linker is a (GGGGS)₃ linker (SEQ ID NO: 385). In some embodiments, a CAR of the present invention includes a leader peptide sequence (e.g., N-terminal to the antigen binding domain). An exemplary leader peptide amino acid sequence is: METDTLLLWVLLLWVPGSTG (SEQ ID NO: 386).

[0257] Provided herein are also nucleic acid molecules that encode the chimeric antigen receptors (CARs) described herein. In some embodiments, the nucleic acid molecule is isolated or purified. Delivery of the nucleic acid molecules ex vivo can be accomplished using methods known in the art. For example, immune cells obtained from a subject may be transformed with a nucleic acid vector encoding the chimeric antigen receptor. The vector may then be used to transform recipient immune cells so that these cells will then express the chimeric antigen receptor. Efficient means of transforming immune cells include transfection and transduction. Such methods are well known in the art. For example, applicable methods for delivery the nucleic acid molecule encoding the chimeric antigen receptor (and the nucleic acid(s) encoding the base editor) can be found in International Application No. PCT/US2009/040040 and U.S. Pat. Nos. 8,450,112; 9,132,153; and 9,669,058, each of which is incorporated herein in its entirety. Additionally, those methods and vectors described herein for delivering the nucleic acid encoding the base editor are applicable to delivering the nucleic acid encoding the chimeric antigen receptor.

[0258] Some aspects of the present disclosure provide for immune cells comprising a chimeric antigen receptor (CAR) and an altered endogenous gene (e.g., A2AR, A2BR, HIF1α, and HIF1α.I3), whose alteration increases resistance to immunosuppression, or an altered endogenous gene that provides increased cytokine production, persistence, resistance to fratricide, enhances immune cell function, resistance to immunosuppression or inhibition, or a combination thereof. In some embodiments, immune cells described herein comprise a chimeric antigen receptor (CAR) and an altered endogenous gene that provides increased resistance to hypoxia-adenosinergic immunosuppression. In some embodiments, the altered endogenous gene may be created by base editing. In some embodiments, the base editing may reduce or attenuate the gene expression. In some embodiments, the base editing may reduce or attenuate the gene activation. In some embodiments, the base editing may reduce or attenuate the functionality of the gene product. In some other embodiments, the base editing may activate or enhance the gene expression. In some embodiments, the base editing may increase the functionality of the gene product. In some embodiments, the altered endogenous gene may be modified or edited in an exon, an intron, an exon-intron injunction, or a regulatory element thereof. The modification may be edit to a single nucleobase in a gene or a regulatory element thereof. The modification may be in a exon, more than one exons, an intron, or more than one introns, or a combination thereof. The modification may be in an open reading frame of a gene. The modification may be in an untranslated region of the gene, for example, a 3′-UTR or a 5′-UTR. In some embodiments, the modification is in a regulatory element of an endogenous gene. In some embodiments, the modification is in a promoter, an enhancer, an operator, a silencer, an insulator, a terminator, a transcription initiation sequence, a translation initiation sequence (e.g. a Kozak sequence), or any combination thereof.

[0259] Allogeneic immune cells expressing an endogenous immune cell receptor as well as a chimeric antigen receptor (CAR) may recognize and attack host cells, a circumstance termed graft versus host disease (GVHD). The alpha component of the immune cell receptor complex is encoded by the TRAC gene, and in some embodiments, this gene is edited such that the alpha subunit of the TCR complex is nonfunctional or absent. Because this subunit is necessary for endogenous immune cell signaling, editing this gene can reduce the risk of graft versus host disease caused by allogeneic immune cells.

[0260] In some embodiments, editing of genes to provide increased persistence, fratricide resistance, increased cytokine production, increased resistance to immunosuppression, enhance the function of the immune cell or to reduce immunosuppression or inhibition can occur in the immune cell before the cell is transformed to express a chimeric antigen receptor (CAR). In some embodiments, editing of genes to provide increased resistance to hypoxia-adenosinergic immunosuppression can occur in the immune cell before, during, or after the cell is transformed to express a chimeric antigen receptor (CAR). In some embodiments, editing of genes to provide increased cytokine production can occur in the immune cell before, during, or after the cell is transformed to express a chimeric antigen receptor (CAR). In other aspects, editing of genes to increase persistence, provide fratricide resistance, enhance the function of the immune cell or to reduce immunosuppression or inhibition can occur in a CAR-T cell, i.e., after the immune cell has been transformed to express a chimeric antigen receptor (CAR). In some embodiments, editing of genes to provide increased resistance to hypoxia-adenosinergic immunosuppression can occur in a CAR-T cell, i.e., after the immune cell has been transformed to express a chimeric antigen receptor (CAR)

[0261] In some embodiments, the immune cell may comprise one or more edited genes, one or more regulatory elements thereof, or combinations thereof, wherein expression of the edited gene is either knocked out or knocked down. In some embodiments, the immune cell may comprise one or more edited genes, one or more regulatory elements thereof, or combinations thereof, wherein expression of the edited gene is increased. In some embodiments, the immune cell may comprise a chimeric antigen receptor (CAR) and one or more edited genes, one or more regulatory elements thereof, or combinations thereof, wherein expression of the edited gene is either knocked out or knocked down. In some embodiments, the immune cell may comprise a chimeric antigen receptor (CAR) and one or more edited genes, one or more regulatory elements thereof, or combinations thereof, wherein expression of the edited gene is increased.

[0262] In some embodiments, the CAR-T cells have reduced or inactivated surface HLA class-I expression as compared to a similar CAR-T cell, but without further having the one or more edited genes as described herein. In some embodiments, the CAR-T cells have increased persistence as compared to a similar CAR-T cell but without further having the one or more edited genes as described herein. In some embodiments, the CAR-T cells have increased fratricide resistance as compared to a similar CAR-T cell but without further having the one or more edited genes as described herein. In some embodiments, the CAR-T cells have reduced immunogenicity as compared to a similar CAR-T cell but without further having the one or more edited genes as described herein. In some embodiments, the CAR-T cells have lower activation threshold as compared to a similar CAR-T but without further having the one or more edited genes as described herein. In some embodiments, the CAR-T cells have increased anti-neoplasia activity as compared to a similar CAR-T cell but without further having the one or more edited genes as described herein. In some embodiments, the CAR-T cells have increased T- and/or NK-cell resistance as compared to a similar CAR-T cell but without further having the one or more edited genes as described herein. The one or more genes may be edited by base editing. In some embodiments the one or more genes are components of hypoxic and/or adenosinergic pathways or regulatory components thereof. In some embodiments the one or more genes are selected from A2AR, A2BR, HIF1α, and HIF1α.I3.

[0263] In some embodiments, a cell having an alteration in in a polynucleotide (e.g., gene) encoding one or more of A2AR, A2BR, HIF1a, and HIF1α.I3 further comprises an alteration in a polypeptide selected from one or more of the following: 02M, TAP1, TAP2, and Tapasin; TRAC, CD52, CIITA, HLA-E, HLA-G, PD-L1, PD1, and CD47; TRAC, CD52, and CIITA; HLA-E, HLA-G, PD-L1, PD1, and CD47; one or more of 02M, TAP1, TAP2, and Tapasin and one or more of HLA-E, HLA-G, PD-L1, PD1, and CD47.

[0264] In embodiments, a cell of the present disclosure is edited according to methods provided herein and/or those available in the art to alter a nucleobase in one or more genes (e.g., using a base editor), one or more regulatory elements thereof, or combinations thereof. In some instances, the alteration is associated with a reduction in expression and/or activity of a polypeptide encoded by the one or more genes. In some embodiments the one or more genes, or one or more regulatory elements thereof, or combinations thereof, may be selected from a group consisting of: BRINP1, JNK1, PRKCQ, CHIP, CD70, CD58, PD-1, SIRT1, and RNF20. In some embodiments, the one or more genes, or regulatory elements thereof, comprise a combination of targets including one or more of SIRT1 and RNF20, and one or more of PD-1, CD70, and CD58. In embodiments, the combination of targets further includes β2M (β2M). In some embodiments, the one or more genes comprise a combination of targets selected from the following: SIRT1, PD-1, CD70, and CD58; SIRT1, PD-1, and CD70; SIRT1, PD-1, and CD58; SIRT1, CD70, and CD58; SIRT1 and PD-1; SIRT1 and CD70; SIRT1 and CD58; SIRT1, PD-1, CD70, CD58, and B2M; SIRT1, PD-1, CD70, and B2M; SIRT1, PD-1, CD58 and B2M; SIRT1, CD70, CD58, and B2M; SIRT1, PD-1, and B2M; SIRT1, CD70, and B2M; SIRT1, CD58, and B2M; RNF20, PD-1, CD70, and CD58; RNF20, PD-1, and CD70; RNF20, PD-1, and CD58; RNF20, CD70, and CD58; RNF20 and PD-1; RNF20 and CD70; RNF20 and CD58; RNF20, PD-1, CD70, CD58, and B2M; RNF20, PD-1, CD70, and B2M; RNF20, PD-1, CD58 and B2M; RNF20, CD70, CD58, and B2M; RNF20, PD-1, and B2M; RNF20, CD70, and B2M; RNF20, CD58, and B2M; SIRT1, RNF20, PD-1, CD70, and CD58; SIRT1, RNF20, PD-1, and CD70; SIRT1, RNF20, PD-1, and CD58; SIRT1, RNF20, CD70, and CD58; SIRT1, RNF20, and PD-1; SIRT1, RNF20, and CD70; SIRT1, RNF20, and CD58; SIRT1, RNF20, PD-1, CD70, CD58, and B2M; SIRT1, RNF20, PD-1, CD70, and B2M; SIRT1, RNF20, PD-1, CD58, and B2M; SIRT1, RNF20, CD70, CD58, and B2M; SIRT1, RNF20, PD-1, and B2M; SIRT1, RNF20, CD70, and B2M; and SIRT1, RNF20, CD58, and B2M. In embodiments, the one or more genes or regulatory elements thereof include one or more of the following: TAP1, TAP2, Tapasin, NLRC5, CD155, HLA-A, HLA-B, HLA-C, MICA, MICB, Nectin-2, TRAC, ULBP, CIITA, TRBC1, TRBC2, and CD52.

[0265] In some embodiments, the at least one or more genes or regulatory elements thereof include one or more of the following: B cell leukemia/lymphoma 11b (Bcl11b); B cell leukemia/lymphoma 2 related protein A1d (Bcl2a1d); B cell leukemia/lymphoma 6 (Bcl6); butyrophilin-like 6 (Btn16); CD151 antigen (Cd151); chemokine (C-C motif) receptor 7 (Ccr7); discs large MAGUK scaffold protein 5 (Dlg5); erythropoietin (Epo); G protein-coupled receptor 18 (Gpr18); interferon alpha 15 (Ifna15); interleukin 6 signal transducer (I16st); interleukin 7 receptor (117r); Janus kinase 3 (Jak3); membrane associated ring-CH-type finger 7 (Marchf7); NCK associated protein 1 like (Nckap11); phospholipase A2, group IIF (Pla2g2f); runt related transcription factor 3 (Runx3); Signal-regulatory protein beta 1B (Sirpb1b); transforming growth factor, beta 1 (Tgfb1); tumor necrosis factor (ligand) superfamily, member 14 (Tnfsf14); tumor necrosis factor (ligand) superfamily, member 18 (Tnfsf18); tumor necrosis factor (ligand) superfamily, member 8 (Tnfsf8); zinc finger CCCH type containing 8 (Zc3h8); (Rac family small GTPase 2); (Slc4a1); 5-azacytidine induced gene 2 (Azi2); a disintegrin and metalloprotease domain 17 (Adam 17); a disintegrin and metalloprotease domain 8 (Adam8); Acetyl-CoA Acetyltransferase 1 (ACAT1); ACLY; adapter related protein complex 3 beta 1 sububit (Ap3b1); adapter related protein complex 3 delta 1 sububit (Ap3d1); adenosine A2a receptor (Adora2a); adenosine deaminase (Ada); adenosine kinase (Adk); adenosine regulating molecule 1 (Adrm1); advanced glycosylation end product-specific receptor (Ager) allograft inflammatory factor 1 (Aif1); AKT1; AKT2; amyloid beta (A4) precursor protein-binding family B member 1 interacting protein (Apbb1ip); ankyrin repeat and LEM domain (Ankle1); annecin A1 (Anxa1); arginase liver (Arg 1); arginase type II (Arg 2); AtPase Cu++ transporting, alpha polypeptide (Atp7a); autoimmune regulator (Aire); autophagy related 5 (Atg5); AXL; B and T Lymphocyte Associated (BTLA); B and T lymphocyte associated (Btla); B cell leukemia/lymphoma 10 (Bcl10); B cell leukemia/lymphoma 11a (Bcl11a); B cell leukemia/lymphoma 2 (Bcl2); B cell leukemia/lymphoma 3 (Bcl3); basic leucine zipper transcription factor, ATF-like (Batf); BCL2-associated X protein (Bax); BCL2L11; beta 2 microglobulin (B2m); BL2-associated agonist of cell dealth (Bad); BLIMP1; Bloom syndrome, RecQ like helicase (Blm); Bmi1 polycomb ring finger oncogene (Bmi1); Bone morphogenic protein 4 (Bmp4); Braf transforming gene (Braf); butyrophilin, subfamily 2, member A1 (Btn2al); butyrophilin, subfamily 2, member A2 (Btn2a2); butyrophilin-like 1 (Btnll); butyrophilin-like 2 (Btnl2); c-abl oncogene 1 (Abl1); c-abl oncogene 2 (Abl2); cadherin-like 26(Cdh26); calcium channel, voltage dependent, beta 4 subunit (Cacnb4); CAMK2D; capping protein regulator and myosin 1 linker 2 (Carmil2); carcinoembryonic antigen-related cell adhesion molecule (Ceacam1); Casitas B-lineage lymphoma b (Cblb); CASP8; Caspase 3 (Casp3); caspase recruitment domain family member 11 (Card11); catenin (cadherin associated protein), beta 1 (Ctnnb1); caveolin 1 (Cav1); CBL-B; CCAAT/enhancer binding protein (C/EBP), beta (Cebpb); CCR10; CCR4; CCR5; CCR6; CCR9; CD103; CD11a; CD122; CD123; CD127; CD130; CD132; CD160 antigen (Cd160); CD161; CD19; CD1d1 antigen (Cd1d1); CD1d2 antigen (CD1d2); CD2 antigen (CD2); CD209e antigen (Cd209e); CD23; CD244 molecule A (Cd244a); CD24a antigen (Cd24a); CD27 antigen (CD27); CD274 antigen (Cd274); CD276 antigen (Cd276); CD28 antigen (Cd28); CD3 delta; CD3 epsilon; CD3 gamma; CD30; CD300A molecule (Cd300a); CD33; CD38; CD4 antigen (Cd4); CD40 ligand (Cd40lg); CD44 antigen (Cd44); CD46 antigen, complement regulatory protein (Cd46); CD47 antigen (Rh-related antigen, integrin-associated signal transducer) (Cd47); CD48 antigen (Cd48); CD5 antigen (Cd5); CD52; CD58; CD59b antigen (Cd59b); CD6 antigen (Cd6); CD69; CD7; CD70; CD74 antigen (Cd74); CD8; CD8 antigen (Cd8); CD80 antigen (Cd80); CD81 antigen (Cd81); CD82; CD83 antigen (Cd83); CD86; CD86 antigen (Cd86); CD8A; CD96; CD99; CDK4; CDK8; CDKN1B; chemokine (C motif) ligand 1 (Xc11); chemokine (C-C motif) ligand 19 (Ccl19); chemokine (C-C motif) ligand 2 (Ccl2); chemokine (C-C motif) ligand 20 (Ccl20); chemokine (C-C motif) ligand 5 (Ccl5); chemokine (C-C motif) receptor 2 (Ccr2); chemokine (C-C motif) receptor 6 (Ccr6); chemokine (C-C motif) receptor 9 (Ccr9); chemokine (C-X-C motif) ligand 12 (Cxcl12); chemokine (C-X-C motif) receptor (Cxcr4); Chitinase 3 Like 1 (Chi311); cholinergic receptor, nicotinic, alpha polypeptide 7 (Chrna7); chromodomain helicase DNA binding protein 7 (Chd7); CLA; Class II Major Histocompatibility Complex Transactivator (CIITA); cleft lip and palate associated transmembrane protein 1 (Clptm1); Cluster of Differentiation 123 (CD123); Cluster of Differentiation 3 (CD3); Cluster of Differentiation 33 (CD33); Cluster of Differentiation 52 (CD52); Cluster of Differentiation 7 (CD7); Cluster of Differentiation 96 (CD96); coagulation factor II (thrombin) receptor-like 1 (F2rl1); coil-coil domain containing 88B (Ccdc88b); core-binding factor beta (Cbfb); coronin, actin binding protein 1A (Coro1a); coxsackie virus and adenovirus receptor (Cxadr); CS-1; CSF2CSK; c-src tyrosine kinase (Csk); C-type lectin domain family 2, member i (Clec2i); C-type lectin domain family 4, member a2 (Clec4a2); C-type lectin domain family 4, member d (Clec4d); C-type lectin domain family 4, member e (Clec4e); C-type lectin domain family 4, member f (Clec4f); C-type lectin domain family 4, member g (Clec4g); CUL3; CXCR3; cyclic GMP-AMP synthase (Cgas); cyclin D3 (Ccnd3); cyclin dependent kinase inhibitor 2A (Cdkn2a); cyclin-dependent kinase (Cdk6); CYLD lysine 63 deubiquitinase (Cyld); cysteine-rich protein 3 (Crip3); cytidine 5′-triphosphate synthase (Ctps); Cytochrome P450 Family 11 Subfamily A Member 1 (Cyp11a1); cytochrome P450, family 26, subfamily b, polypeptide (Cyp26b1); Cytokine Inducible SH2 Containing Protein (CISH); cytotoxic T lymphocyte-associated protein 2 alpha (Ctla2a); Cytotoxic T-Lymphocyte Associated Protein 4 (CTLA-4); DCK; dedicator of cytokinesis 2 (Dock2); dedicator of cytokinesis 8 (Dock8); delta like canonical Notch ligand 4 (D114); deltex 1, E3 ubiquitin ligase (Dtx1); deoxyhypusine synthase (Dhps); DGKA; DGKZ; DHX37; dicer 1, ribonuclease type III (Dicer1); dipeptidylpeptidase 4 (Dpp4); discs large MAGUK scaffold protein 1 (Dlg1); DnaJ heat shock protein family (Hsp40) member A3 (Dnaja3); dolichyl-di-phosphooligosaccharide-protein glycotransferase (Ddost); double homeobox B-like 1 (Duxbl1); drosha, ribonuclease type III (Drosha); dual specificity phosphatase 10 (Dusp10); dual specificity phosphatase 22 (Dusp22); dual specificity phosphatase 3 (Dusp3); E74-like factor 4 (Elf4); early growth response 1(Egr1); early growth response 3 (Egr3); ELOB (TCEB2); ENTPD1 (CD39); eomesodermin (Eomes); Eph receptor B4 (Ephb4); Eph receptor B6 (Ephb6); ephrin B1 (Efnb1); ephrin B2 (Efnb2); ephrin B3 (Efnb3); Epstein-Barr virus induced gene 3 (Ebi3); erb-b2 receptor tyrosine kinase (Erbb2); eukaryotic translation initiation factor 2 alpha kinase 4 (Eif2ak4); FADD; family with sequence similarity 49, member B (Fam49b); Fanconi anemia, complementation group A (Fanca); Fanconi anemia, complementation group D2 (Fancd2); Fas (TNF receptor superfamily member 6) (Fas); Fas (TNFRSF6)-associated via death domain (Fadd); Fas Cell Surface Death Receptor (FAS); Fc receptor, IgE, high affinity I, gamma polypeptide (Fcer1g); fibrinogen-like protein 1 (Fgl1); fibrinogen-like protein 2 (Fgl2); FK506 binding protein 1a (Fkbp1a); FK506 binding protein 1b ((Fkbp1b); flotillin 2 (Flot2); FMS-like tyrosine kinase (Flt3); forkhead box J1 (Foxj1); forkhead box N1 (Foxn1); forkhead box P1 (Foxp1); forkhead box P3 (Foxp3); frizzled class receptor 5 (Fzd5); frizzled class receptor 7 (Fzd7); frizzled class receptor 8 (Fzd8); fucosyltransferase 7 (Fut7); Fyn proto-oncogene (Fyn); gap junction protein, alpha 1 (Gja1); GATA binding protein 3 (GATA3); GCN2 kinase (IDO pathway); gelsolin (Gsn); GLI-Kruppel family member GLI3 (Gli3); glycerol-3-phosphate acyltransferase, mitochondrial (Gpam); growth arrest and DNA-damage-inducible 45 gamma (Gadd45g); GTPase, IMAP family member 1 (Gimap1); H1TET2; H2.0-like homeobox (Hlx); haematopoietic 1(hem1); HCLS1 binding protein 3 (Hs1bp3); heat shock 105 kDa/110 kDa protein 1(Hsph1); heat shock protein 1 (chaperonin) (Hspd1); heat shock protein 90, alpha (cytosolic), class A member 1 (Hsp90aa1); hematopoietic SH2 domain containing (Hsh2d); hepatitis A virus cellular receptor 2 (Havcr2); hes family bHLH transcription factor 1 (Hes1); histocompatibility 2, class II antigen A, alpha (H2-Aa); histocompatibility 2, class II antigen A, beta 1 (H2-Ab1); histocompatibility 2, class II, locus DMa (H2-DMa); histocompatibility 2, M region locus 3(H3-M3); histocompatibility 2, O region alpha locus (H2-Oa); histocompatibility 2, T region locus 23 (H2-T23); HLA-DR; homeostatic iron regulator (Hfe); icos ligand (Icos1); IKAROS family zinc finger 1 (Ikzf1); IL10; IL10RA; IL2 inducible T cell kinase (Itk); IL6R; Indian hedgehog (Ihh); indoleamine 2,3-dioxygenase 1 (Idol); inducible T cell co-stimulator (Icos); inositol 1,4,5-trisphosphate 3-kinase B (Itpkb); insulin II (Ins2); insulin-like growth factor 1 (Igf1); insulin-like growth factor 2 (Igf2); insulin-like growth factor binding protein 2 (Igfbp2); integrin alpha L (Itgal); integrin alpha M (Itgam); integrin alpha V (Itgav); integrin alpha X (Itgax); integrin beta 2 (Itgb2); integrin, alpha D (Itgad); intercellular adhesion molecule 1 (Icam1); interferon (alpha and beta) receptor 1(Ifnar1); interferon alpha 1 (Ifna1); interferon alpha 11 (Ifna11); interferon alpha 12 (Ifna12); interferon alpha 13 (Ifna13); interferon alpha 14 (Ifna14); interferon alpha 16 (Ifna16); interferon alpha 2 (Ifna2); interferon alpha 4 (Ifna4); interferon alpha 5 (Ifna5); interferon alpha 6 (Ifna6); interferon alpha 7 (Ifna7); interferon alpha 9 (Ifna9); interferon alpha B (Ifnab); interferon beta 1 (Ifnb1); interferon gamma (Ifng); interferon kappa (Ifnk); interferon regulatory factor 1 (Irf1); interferon regulatory factor 4 (Irf4); interferon zeta (Ifnz); interleukin 1 beta (Il1b; interleukin 1 family, member 8 (Il1f8); interleukin 1 receptor-like 2 (Il1r12); interleukin 12 receptor, beta1 (Il12rb1); interleukin 12a (12a); interleukin 12b (12b); interleukin 15 (Il15); interleukin 18 (Il18); interleukin 18 receptor 1 (Il18r1); interleukin 2 (Il2); interleukin 2 receptor, alpha chain (I12ra); interleukin 2 receptor, gamma chain (Il2rg); interleukin 20 receptor beta (Il20rb); interleukin 21 (Il21); interleukin 23, alpha subunit p19 (Il23a); interleukin 27 (Il27); interleukin 4 (Il4); interleukin 4 receptor, alpha (Il4ra); interleukin 6 (Il6); interleukin 7 (Il7); IRF8; itchy, E3 ubiquitin protein ligase (Itch); jagged 2 (Jag2); jumonji domain containing 6 (Jmjd6); J UNB; junction adhesion molecule like 9 (Jam9); K(lysine) acetyltransferase 2A (Kat2a); KDEL (Lys-Asp-Glu-Leu) endoplasmic reticulum protein retention receptor 1 (Kdelr1); KIT proto-oncogene receptor tyrosine kinase (Kit); LAG-3; LAIR-1 (CD305); LDHA; lectin, galactose binding, soluble 1 (Lgals1); lectin, galactose binding, soluble 3 (Lgals3); lectin, galactose binding, soluble 8 (Lgals8); lectin, galactose binding, soluble 9 (Lgals9); leptin (Lep); leptin receptor (Lepr); leucine rich repeat containing 32 (Lrrc32); leukocyte immunoglobulin-like receptor, subfamily B, member 4A (Lilrb4a); LFNG O-fucosylpeptide 3-beta-N-acetylglucosaminyltransferase (Lfng); LIF; ligase IV, DNA, ATP-dependent (Lig4); LIM domain only 1 (Lmo1); limb region 1 like (Lmbr1); linker for activation of T cells (Lat); lymphocyte antigen 9 (Ly9); lymphocyte cytosolic protein 1 (Lcp1); lymphocyte protein tyrosine kinase (Lck); lymphocyte transmembrane adaptor 1 (Lax1); lymphocyte-activation gene 3 (Lag3); lymphoid enhancer binding factor 1 (Lef1); LYN; lysyl oxidase-like 3 (Lox13); MAD1 mitotic arrest deficient 1-like 1 (Mad1l1); MALT1 paracaspase (Malt1); MAP4K4; MAPK14; MCJ; mechanistic target of rapamycin kinase (Mtor); MEF2D; Methylation-Controlled J Protein (MCJ); methyltransferase like 3 (Mettl3); MGAT5; MHC I like leukocyte 2 (Mill2); midkine (Mdk); mitogen-activated protein kinase 8 interacting protein 1 (Mapk8ip10); moesin (Msn); myelin protein zero-like 2 (Mpzl2); myeloblastosis oncogene (Myb); myosin, heavy polypeptide 9, non-muscle (Myh9); Nedd4 family interacting protein 1 (Ndfip1); neural precursor cell expressed, developmentally down-regulated 4 (Nedd4); NFATc1; NFATC2; NFATC4; NFKB activating protein (Nkap); nicastrin (Ncstn); NK2 homeobox 3 (Nkx2-3); NLR family, CARD domain containing 3 (Nlrc3); NLR family, pyrin domain containing 3 (Nlrp3); non-catalytic region of tyrosine kinase adaptor protein 1 (Nck1); non-catalytic region of tyrosine kinase adaptor protein 2 (Nck2); non-homologous end joining factor 1 (Nhej 1); non-SMC condensin II complex, subunit H2 (Ncaph2); Notch-regulated ankyrin repeat protein (Nrarp); NT5E (CD73); nuclear factor of activated T cells, cytoplasmic, calcineurin dependent (Nfatc3); nuclear factor of kappa light polypeptide gene enhancer in B cells inhibitor, delta (Nfkbid); nuclear receptor co-repressor 1 (Ncor1); Nuclear Receptor Subfamily 4 Group A Member 1 (NR4A1); Nuclear Receptor Subfamily 4 Group A Member 2 (NR4A2); Nuclear Receptor Subfamily 4 Group A Member 3 (NR4A3); ODC1; OTU domain containing 5 (Otud5); OTULINL (FAM105A); paired box 1 (Pax1); PDCD1 (PD1; PD-1); PDIA3; pellino 1 (Peli1); peroxiredoxin 2 (Prdx2); PHD1 (EGLN2); PHD2 (EGLN1); PHD3 (EGLN3); phosphodiesterase 5A, cGMP-specific (Pde5a); phosphoinositide-3-kinase regulatory subunit (Pik3r6); phospholipase A2, group IIA (Pla2g2a); phospholipase A2, group IID (Pla2g2d); phospholipase A2, group IE (Pla2g2e); phosphoprotein associated with glycosphingolipid microdomains 1 (Pag1); PIK3CD; PIKFYVE; POZ (BTB) and AT hook containing zinc finger 1 (Patz1); PPARa; PPARd; PR domain containing 1, with ZNF domain (Prdm1); presenilin 1 (Psen1); presenilin 2 (Psen2); PRKACA; PRKC, apoptosis, WT1, regulator (Pawr); programmed cell death 1 ligand 2 (Pdcd1lg2); prosaposin (Psap); prostaglandin E receptor 4 (subtype EP4) (Ptger4); protein kinase C, theta 2 (Prkcq); protein kinase C, zeta (Prkcz); protein kinase, cAMP dependent regulatory, type I, alpha (Prkar1a); protein kinase, DNA activated, catalytic polypeptide (Prkdc); protein phosphatase 3, catalytic subunit, beta isoform (Ppp3cb); protein tyrosine phosphatase, non-receptor type 2 (Ptpn2); protein tyrosine phosphatase, non-receptor type 22 (lymphoid) (Ptpn22); protein tyrosine phosphatase, non-receptor type 6 (Ptpn6); protein tyrosine phosphatase, receptor type, C (Ptprc); PTEN; PTPN11; purine-nucleoside phosphorylase (Pnp); purinergic receptor P2X, ligand-gated ion channel, 7 (P2rx7); PVR Related Immunoglobulin Domain Containing (PVRIG; CD112R); PYD and CARD domain containing 7 (Pycard); RAB27A, member RAS oncogene family (Rab27a); RAB29, member RAS oncogene family (Rab29); radical S-adenosyl methionine domain containing 2 (Rsad2); RAR-related orphan receptor alpha (Rora); RAR-related orphan receptor gamma (Ror); RAS guanyl releasing protein 1 (Rasgrp1); ras homolog family member A (Rhoa); ras homolog family member H (Rhoh); RAS protein activator like 3 (Rasal3); RASA2; receptor (TNFRSF)-interacting serine-threonine kinase 2 (Ripk2); recombination activating gene 1 (Rag1); recombination activating gene 2 (Rag2); Regulatory Factor X Associated Ankyrin Containing Protein (RFXANK); RHO family interacting cell polarization regulator 2 (Ripor2); ribosomal protein L22 (Rpl 22); ribosomal protein S6 (Rps6); RING CCCH (C3H) domains 1 (Rc3hl); ring finger and CCCH-type zinc finger domains 2 (Rc3h2); RNF2; runt related transcription factor 1 (Runx1); runt related transcription factor 2 (Runx2); SAM and SH3 domain containing 3 (Sash3); schlafen 1; Selectin P Ligand/P-Selectin Glycoprotein Ligand-1 (SELPG/PSGL1) polypeptide; selenoprotein K (Selenok); sema domain immunoglobulin domain (Ig), transmembrane Domain (TM) and short cytoplasmic domain, (semaphorin) 4A (Sema4a); serine/threonine kinase 11 (Stk11); SH3 domain containing ring finger 1 (Sh3rf1); SHP1; sialophorin (Spn); SIGLEC15; signal transducer and activator of transcription 3 (Stat3); signal transducer and activator of transcription 5A (Stat5A); signal transducer and activator of transcription 5B (Stat5B); signal-regulatory protein alpha (Sirpa); Signal-regulatory protein beta 1A (Sirpb1a); Signal-regulatory protein beta 1C (Sirpb1c); SLA; SLAM family member 6 (Slamf6); SLAMF7; SMAD family member 3 (Smad3); SMAD family member 7 (Smad7); SMARCA4; solute carrier family 11 (proton-coupled divalent metal ion transporters), member 1 (Slc11a1); solute carrier family 4 (anion exchanger), member 1; solute carrier family 46, member 2 (Slc46a2); sonic hedgehog (Shh); SOS Ras/Rac guanine nucleotide exchange factor 1 (Sos1); SOS Ras/Rac guanine nucleotide exchange factor 2 (Sos2); special AT-rich sequence binding protein 1 (Satb1); spleen tyrosine kinase (Syk); Sprouty RTK Signaling Antagonist 1 (Spry1); Sprouty RTK Signaling Antagonist 2 (Spry2); squamous cell carcinoma antigen recognized by T cells (Sart1); src homology 2 domain-containing transforming protein B (Shb); Src-like-adaptor 2 (Sla2); SRY (sex determining region Y)-box 4 (Sox4); STK4; suppression inducing transmembrane adaptor 1 (Sit1); suppressor of cytokine signaling 1 (Socs1); suppressor of cytokine signaling 5 (Socs5); suppressor of cytokine signaling 6 (Socs6); surfactant associated protein D (Sftpd); SUV39; syndecan 4 (Sdc4); syntaxin 11 (Stx11); T Cell Immunoglobulin Mucin 3 (Tim-3); T cell immunoreceptor with Ig and ITIM domains (Tigit); T cell receptor alpha joining 18 (Traj18); T Cell Receptor Beta Constant 1 (TRBC1); T Cell Receptor Beta Constant 2 (TRBC2); T cell, immune regulator 1, ATPase, H+ transporting, lysosomal V0 protein A3 (Tcirg1); T cell-interacting, activating receptor on myeloid cells 1 (Tarm1); T-box 21 (Tbx21); TCR; TCR alpha; TCR beta; TCR complex gene sequence; Tet Methylcytosine Dioxygenase 2 (TET2); TGFbRII; TGFbRII (TGFBR2); three prime repair exonuclease 1 (Trex1); thymocyte selection associated (Themis); thymus cell antigen 1, theta (Thy1); TMEM222; TNF receptor-associated factor 6 (Traf6); TNFAIP3; TNFRSF10B; TNFRSF8 (CD30); TOX; TOX2; TRAC; transformation related protein 53 (Trp53); Transforming Growth Factor Beta Receptor II (TGFbRII); transforming growth factor, beta receptor II (Tgfbr2); transmembrane 131 like (Tmem131l); transmembrane protein 98 (Tmem98); triggering receptor expressed on myeloid cells-like 2 (Treml2); TSC complex subunit 1 (Tsc1); tumor necrosis factor (ligand) superfamily, member 11 (Tnfsf11); tumor necrosis factor (ligand) superfamily, member 13b (Tnfsf13b); tumor necrosis factor (ligand) superfamily, member 4 (Tnfsf4); tumor necrosis factor (ligand) superfamily, member 9 (Tnfsf9); tumor necrosis factor receptor superfamily, member 13c (Tnfrsf13c); tumor necrosis factor receptor superfamily, member 4 (Tnfrsf4); tumor necrosis factor, alpha-induced protein 8-like 2 (Tnfa1p812); twisted gastrulation BMP signaling modulator 1 (Twsg1); UBASH3A; vanin 1 (Vnn1); vascular cell adhesion molecule 1 (Vcam1); VHL; v-maf musculoaponeurotic fibrosarcoma oncogene family, protein B (avian) (Mafb); V-set and immunoglobulin domain containing 4 (Vsig4); V-Set Immunoregulatory Receptor (VISTA); WD repeat and FYVE domain containing 4 (Wdfy4); wingless-type MMTV integration site family, member 1 (Wnt1); wingless-type MMTV integration site family, member 4 (Wnt4); WNT signaling pathway regulator (Apc); WW domain containing E3 ubiquitin protein ligase 1 (Wwp1); XBP1; YAP1; ZAP70; ZC3H12A; zfp35; zinc finger and BTB domain containing 1 (Zbtb1); zinc finger and BTB domain containing 7B (Zbtb7B); zinc finger CCCH type containing 12A (Zc3h12a); zinc finger CCCH type containing 12D (Zc3h12d); zinc finger E-box binding homeobox 1 (Zeb1); zinc finger protein 36, C3H type (Zfp36); zinc finger protein 36, C3H type-like 1 (Zfp36L1); zinc finger protein 36, C3H type-like 2 (Zfp36L2); and zinc finger protein 683 (Zfp683). Further non-limiting examples of the one or more genes, or one or more regulatory elements thereof, or combinations thereof include those described in PCT/US20/13964, PCT/US20/52822, PCT/US20/18178, and/or PCT/US21/52035.

[0266] In some embodiments, an immune cell comprises a chimeric antigen receptor (CAR) and one or more additional edited genes, a regulatory element thereof, or combinations thereof. An edited gene may be an immune response regulation gene, an immunogenic gene, a checkpoint inhibitor gene, a gene involved in immune responses, a cell surface marker, e.g. a T cell surface marker, or any combination thereof. In some embodiments, an immune cell comprises a chimeric antigen receptor and an edited gene that is associated with activated T cell proliferation, alpha-beta T cell activation, gamma-delta T cell activation, positive regulation of T cell proliferation, negative regulation of T-helper cell proliferation or differentiation, or their regulatory elements thereof, or combinations thereof. In some embodiments, the edited gene may be a checkpoint inhibitor gene, for example, such as a PD1 gene, a PDC1 gene, or a member related to or regulating the pathway of their formation or activation.

[0267] In some embodiments, provided herein is an immune cell with an edited gene in a hypoxic and/or adenosinergic pathway component or a regulatory element thereof, such that the immune cell has an increased resistance to hypoxia-adenosinergic immunosuppression. In some embodiments, provided herein is an immune cell with an edited gene in a hypoxic and/or adenosinergic pathway component or a regulatory element thereof, such that the immune cell has an increased cytokine production. In some embodiments, the immune cell comprises an edited gene in a hypoxic and/or adenosinergic pathway component or a regulatory element thereof, and additionally, at least one edited gene.

[0268] In some embodiments, provided herein is an immune cell (e.g., T- or NK-cell) with an edited Adenosine A_{2A} Receptor (A2AR) gene, such that the immune cell does not express or expresses at reduced levels an endogenous functional A2AR. In some embodiments, provided herein is an immune cell with an edited A2AR gene, such that the immune cell has increased resistance to hypoxia-adenosinergic immunosuppression. In some embodiments, provided herein is an immune cell with an edited A2AR gene, such that the immune cell has an increased cytokine production. In some embodiments, the immune cell comprises an edited A2AR gene, and additionally, at least one edited gene.

[0269] In some embodiments, provided herein is an immune cell (e.g., T- or NK-cell) with an edited Adenosine A_{2B} Receptor (A2BR) gene, such that the immune cell does not express or expresses at reduced levels an endogenous functional A2BR. In some embodiments, provided herein is an immune cell with an edited A2BR gene, such that the immune cell has increased resistance to hypoxia-adenosinergic immunosuppression. In some embodiments, provided herein is an immune cell with an edited A2BR gene, such that the immune cell has an increased cytokine production. In some embodiments, the immune cell comprises an edited A2BR gene, and additionally, at least one edited gene.

[0270] In some embodiments, provided herein is an immune cell (e.g., T- or NK-cell) with an edited Hypoxia-Inducible Factor 1-alpha (HIF1α) gene, such that the immune cell does not express or expresses at reduced levels an endogenous functional HIF1α. In some embodiments, provided herein is an immune cell with an edited HIF1α gene, such that the immune cell has increased resistance to hypoxia-adenosinergic immunosuppression. In some embodiments, provided herein is an immune cell with an edited HIF1α gene, such that the immune cell has an increased cytokine production. In some embodiments, the immune cell comprises an edited HIF1α gene, and additionally, at least one edited gene.

[0271] In some embodiments, provided herein is an immune cell (e.g., T- or NK-cell) with an edited Hypoxia-Inducible Factor 1-alpha isoform I3 (HIF1α.I3) gene, such that the immune cell does not express or expresses at reduced levels an endogenous functional HIF1α.I3. In some embodiments, provided herein is an immune cell with an edited HIF1α.I3gene, such that the immune cell has increased resistance to hypoxia-adenosinergic immunosuppression. In some embodiments, provided herein is an immune cell with an edited HIF1α.I3 gene, such that the immune cell has an increased cytokine production. In some embodiments, the immune cell comprises an edited HIF1α.I3gene, and additionally, at least one edited gene.

[0272] In some embodiments, each edited gene may comprise a single base edit. In some embodiments, each edited gene may comprise multiple base edits at different regions of the gene. In some embodiments, a single modification event (such as electroporation), may introduce one or more gene edits. In some embodiments at least one, two, three, four, five, six, seven, eight, nine, ten, eleven, twelve, thirteen, fourteen, fifteen, sixteen, seventeen, eighteen, nineteen, twenty or more edits may be introduced in one or more genes simultaneously. In some embodiments, an immune cell, including but not limited to any immune cell comprising an edited gene selected from any of the aforementioned gene edits, can be edited to generate mutations in other genes that enhance the CAR-T's function or reduce immunosuppression or inhibition of the cell.

### Editing of Target Polynucleotides in Immune Cells

[0273] In general, base editing is carried out to induce therapeutic changes in the genome of a cell (e.g., immune cell (e.g., T- or NK-cell)), such changes include reducing the expression of a polypeptide or polynucleotide of interest (e.g., A2AR, A2BR, HIF1α, and HIF1α.I3) to reduce immunesuppression. In some instances, a system containing a base editor and/or a nucleic acid programmable DNA binding protein with nuclease activity (e.g., Cas12b) and one or more guide polynucleotides is used to induce changes in the genome of a cell that result in reduced or undetectable levels (e.g., knock-out) of expression relative to an unedited cell of each of the following polypeptides: CD3ε, B2M, CIITA, A2AR, TGFbR2, and PD1. In embodiments, base editing is carried out to induce any of the changes described above into the genome of a cell. In some embodiments, the base edit introduces a stop codon, or alteration in a splice acceptor and/or splice donor site that reduces, eliminates, and/or renders protein expression undetectable. Base editing can be carried out in vitro or in vivo. In some embodiments, cells (e.g., immune cell (e.g., T- or NK-cell)) are collected from a subject or a donor. In some embodiments, base editing is carried out to induce therapeutic changes in the genome of an immune cell (e.g., T- or NK-cell). In some embodiments, base editing is carried out to induce therapeutic changes in the genome of an allogeneic immune cell (e.g., T- or NK-cell) of a subject. In some embodiments, base editing is carried out to induce therapeutic changes in the genome of an allogeneic CAR-T cell.

[0274] In some embodiments, immune cells (e.g., T- or NK-cell) of the present invention, are contacted with one or more guide RNAs and a nucleobase editor polypeptide comprising a nucleic acid programmable DNA binding protein (napDNAbp) (e.g., Cas9) domain and a deaminase (e.g., cytidine deaminase and/or adenosine deaminase) domain. In some embodiments, immune cells (e.g., T- or NK-cell) of the present invention, are contacted with one or more guide RNAs and a nucleobase editor polypeptide comprising a nucleic acid programmable DNA binding protein (napDNAbp) (e.g., Cas9) domain and an adenosine deaminase domain. In some embodiments, immune cells (e.g., T- or NK-cell) of the present invention, are contacted with one or more guide RNAs and a nucleobase editor polypeptide comprising a nucleic acid programmable DNA binding protein (napDNAbp) (e.g., Cas9) domain and a cytidine deaminase domain. In some embodiments, immune cells (e.g., T- or NK-cell) of the present invention, are contacted with one or more guide RNAs and a nucleobase editor polypeptide comprising a nucleic acid programmable DNA binding protein (napDNAbp) (e.g., Cas9) domain and an adenosine/cytidine deaminase domain. In some embodiments, the at least one nucleic acid molecule encoding one or more guide RNAs and a nucleobase editor polypeptide is delivered to cells by one or more vectors (e.g., AAV vector).

[0275] In some embodiments, one or more vectors (e.g., AAV vector) comprise at least one nucleic acid molecule encoding one or more guide RNAs and a nucleobase editor polypeptide, which comprises a nucleic acid programmable DNA binding protein (napDNAbp) (e.g., Cas9) domain and a deaminase (e.g., cytidine deaminase and/or adenosine deaminase) domain. In some embodiments, one or more vectors (e.g., AAV vector) comprise at least one nucleic acid molecule encoding one or more guide RNAs, which direct a nucleobase editor polypeptide to edit a site in the genome of a cell (e.g., immune cell (e.g., T- or NK-cell)).

[0276] The present disclosure provides one or more guide RNAs that direct a nucleobase editor polypeptide to edit a site in the genome of the cell (e.g., immune cell (e.g., T- or NK-cell)). In some embodiments, the present invention provides guide RNAs that target one or more genes in an immune cell (e.g., T- or NK-cell) involved in hypoxic and/or adenosinergic pathways or regulatory components thereof. In some embodiments, the present invention provides guide RNAs that target one or more genes selected from A2AR, A2BR, HIF1α, and HIF1α.I3. In some embodiments, the nucleobase editor polypeptide comprises a deaminase that introduces a stop codon or alters a splice donor or splice acceptor site in a target gene. In some embodiments, the gRNA comprises nucleotide analogs. These nucleotide analogs can inhibit degradation of the gRNA from cellular processes.

[0277] In embodiments, a guide polynucleotide of the present disclosure includes a scaffold capable of binding a nucleic acid programmable DNA binding protein (e.g., Cas9 or Cas12b). Non-limiting examples of scaffold sequences include the following:

(Cas9 scaffold; SEQ ID NO: 317)
GUUUUAGAGCUAGAAAUAGCAAGUUAAAAUAAGGCUAGUCCGUUAUCAA
CUUGAAAAAGUGGCACCGAGUCGGUGCUUUU
and
(Cas12b scaffold; SEQ ID NO: 321)
GUUCUGUCUUUUGGUCAGGACAACCGUCUAGCUAUAAGUGCUGCAGGGU
GUGAGAAACUCCUAUUGCUGGACGAUGUCUCUUACGAGGCAUUAGCAC.

[0278] Exemplary guide RNA sequences are provided in the following Tables 1A and 1B.

TABLE 1A
Guide RNA Sequences (in Table 1A “SD” represents “splice donor,” “SA” represents “splice acceptor”, “Ex” represents “exon”,
and “Pos” represents “position” within the target sequence, “STOP” indicates a mutation introducing a new stop codon, “START” indicates a
mutation editing a start site codon (e.g., an initial ATG codon))

| | | Target | | Guide | | | | |
|---|---|---|---|---|---|---|---|---|
| | | SEQ ID | | SEQ ID | | | Base | |
| Guide No. | Target Sequence | NO | Spacer Sequence | NO: | PAM | Gene | Editor | Base Edit Position |
| sgRNA | TCACCGGAGCGGGATGCGGA | 420 | UCACCGGAGCGGGAUGCGGA | 387 | NGG | A2AR | CBE | Ex1 SD (Pos 4) |
| 144 | | | | | | | | |
| sgRNA | CTGCTCACCGGAGCGGGATG | 421 | CUGCUCACCGGAGCGGGAUG | 388 | NGG | A2AR | CBE | Ex1 SD (Pos 8) |
| 145 | | | | | | | | |
| sgRNA | CACTCCCAGGGCTGCGGGGA | 422 | CACUCCCAGGGCUGCGGGGA | 389 | NGG | A2AR | CBE | Ex2 STOP (Pos 7) |
| 146 | | | | | | | | |
| sgRNA | CCACTCCCAGGGCTGCGGGG | 423 | CCACUCCCAGGGCUGCGGGG | 390 | NGG | A2AR | CBE | Ex2 STOP (Pos 8) |
| 147 | | | | | | | | |
| sgRNA | GCGACGACAGCTGAAGCAGA | 424 | GCGACGACAGCUGAAGCAGA | 391 | NGG | A2AR | CBE | Ex2 STOP (Pos 8) |
| 148 | | | | | | | | |
| sgRNA | TGGAGAGCCAGCCTCTGCCG | 425 | UGGAGAGCCAGCCUCUGCCG | 392 | NGG | A2AR | CBE | Ex2 STOP (Pos 9) |
| 149 | | | | | | | | |
| sgRNA | GGAGAGCCAGCCTCTGCCGG | 426 | GGAGAGCCAGCCUCUGCCGG | 393 | NGG | A2AR | CBE | Ex2 STOP (Pos 8) |
| 150 | | | | | | | | |
| sgRNA | ACATGAGCCAGAGAGGGGCG | 427 | ACAUGAGCCAGAGAGGGGCG | 394 | NGG | A2AR | CBE | Ex2 STOP (Pos 8/9) |
| 151 | | | | | | | | |
| sgRNA | GAGGCAGCAAGAACCTTTCA | 428 | GAGGCAGCAAGAACCUUUCA | 395 | NGG | A2AR | CBE | Ex2 STOP (Pos 5/8) |
| 152 | | | | | | | | |
| sgRNA | TGGCCCACACTCCTGGCGGG | 429 | UGGCCCACACUCCUGGCGGG | 396 | NGG | A2AR | CBE | Ex2 STOP (Pos 5/6) |
| 153 | | | | | | | | |
| sgRNA | CGTTGGCCCACACTCCTGGC | 430 | CGUUGGCCCACACUCCUGGC | 397 | NGG | A2AR | CBE | Ex2 STOP (Pos 8/9) |
| 154 | | | | | | | | |
| sgRNA | TCTCCCCAGGTACAATGGCT | 431 | UCUCCCCAGGUACAAUGGCU | 398 | NGG | A2AR | ABE | Ex2 SA (Pos 8) |
| 155 | | | | | | | | |
| sgRNA | CAGTTGTTCCAACCTAGCAT | 432 | CAGUUGUUCCAACCUAGCAU | 399 | NGG | A2AR | | Ex2 STOP (Pos 8/9) |
| 201 | | | | | | | | |
| sgRNA | GGCCATGCTGCTGGAGACAC | 433 | GGCCAUGCUGCUGGAGACAC | 400 | NGG | A2BR | ABE | Ex1 START (Pos 5) |
| 221 | | | | | | | | |
| sgRNA | TCACCTGAGCGGGACACAGA | 434 | UCACCUGAGCGGGACACAGA | 401 | NGG | A2BR | | Ex1 SD (Pos 4) |
| 222 | | | | | | | | |
| sgRNA | TTACTGTTCCACCCCAGGAA | 435 | UUACUGUUCCACCCCAGGAA | 402 | NGG | A2BR | | Ex2 STOP (Pos 9) |
| 223 | | | | | | | | |
| sgRNA | TTTAAACAGGTATAAAAGTT | 436 | UUUAAACAGGUAUAAAAGUU | 403 | NGG | A2BR | ABE | Ex2 SA (Pos 8) |
| 224 | | | | | | | | |
| sgRNA | GCTTCAGCGCACTGAGCTGA | 437 | GCUUCAGCGCACUGAGCUGA | 404 | NGG | A2BR | | Ex2 STOP (Pos 5) |
| 225 | | | | | | | | |
| sgRNA | TGCCAAGCAGATGTCAAGAG | 438 | UGCCAAGCAGAUGUCAAGAG | 405 | NGG | A2BR | | Ex2 STOP (Pos 4) |
| 226 | | | | | | | | |
| sgRNA | CTTACTATCATGATGAGTTT | 439 | CUUACUAUCAUGAUGAGUUU | 406 | NGG | HIF1α | CBE/ABE | Ex7 SD (Pos 5) |
| 158 | | | | | | | | |
| sgRNA | CATATACCTGAGTAGAAAAT | 440 | CAUAUACCUGAGUAGAAAAU | 407 | NGG | HIF1α | CBE | Ex11 SD (Pos 7) |
| 162 | | | | | | | | |
| sgRNA | TCATATACCTGAGTAGAAAA | 441 | UCAUAUACCUGAGUAGAAAA | 408 | NGG | HIF1α | CBE | Ex11 SD (Pos 8) |
| 163 | | | | | | | | |
| sgRNA | TGTTTACAGTTTGAACTAAC | 442 | UGUUUACAGUUUGAACUAAC | 409 | NGG | HIF1α | ABE | Ex4 SA (Pos 8) |
| 168 | | | | | | | | |
| sgRNA | TCATTAGGCCTTGTGAAAAA | 443 | UCAUUAGGCCUUGUGAAAAA | 410 | NGG | HIF1α | ABE | Ex5 SA (Pos 6) |
| 169 | | | | | | | | |
| sgRNA | ACACAGGTATTGCACTGCAC | 444 | ACACAGGUAUUGCACUGCAC | 411 | NGG | HIF1α | ABE | Ex6 SA (Pos 5) |
| 170 | | | | | | | | |
| sgRNA | TAACAGAATTACCGAATTGA | 445 | UAACAGAAUUACCGAAUUGA | 412 | NGG | HIF1α | ABE | Ex7 SA (Pos 5) |
| 171 | | | | | | | | |
| sgRNA | AACAGAATTACCGAATTGAT | 446 | AACAGAAUUACCGAAUUGAU | 413 | NGG | HIF1α | ABE | Ex7 SA (Pos 4) |
| 172 | | | | | | | | |
| sgRNA | TTTCAGAACTACAGTTCCTG | 447 | UUUCAGAACUACAGUUCCUG | 414 | NGG | HIF1α | ABE | Ex13 SA (Pos 5) |
| 173 | | | | | | | | |
| sgRNA | AGCTCCCAATGTCGGAGTTT | 448 | AGCUCCCAAUGUCGGAGUUU | 415 | NGA | HIF1α. | | Ex1.5 STOP (Pos 7) |
| 227 | | | | | | I3 | | |
| sgRNA | GAGCTCCCAATGTCGGAGTT | 449 | GAGCUCCCAAUGUCGGAGUU | 416 | NGG | HIF1α. | | Ex1.5 STOP (Pos 8) |
| 228 | | | | | | I3 | | |
| sgRNA | TTAAATGAGCTCCCAATGTC | 450 | UUAAAUGAGCUCCCAAUGUC | 417 | NGA | HIF1α. | ABE | Ex1.5 START (Pos 5) |
| 229 | | | | | | I3 | | |
| sgRNA | TTTAAATGAGCTCCCAATGT | 451 | UUUAAAUGAGCUCCCAAUGU | 418 | NGG | HIF1α. | ABE | Ex1.5 START (Pos 6) |
| 230 | | | | | | I3 | | |
| (TSBTx4470) | | | | | | | | |
| sgRNA | ACCATACCCATTTTCTATTC | 452 | ACCAUACCCAUUUUCUAUUC | 419 | NGA | HIF1α. | | Ex1.5 SD (Pos 8) |
| 231 | | | | | | I3 | | |

TABLE 1B
Spacer Sequences.

| | | SEQ | | | |
|---|---|---|---|---|---|
| Guide ID | Guide Sequence | ID NO | PAM | Gene | Notes |
| sgRNA 258 | CCAUGGGUCGGGGGCUGCUC | 490 | NGG | TGFbR2 ABE | |
| sgRNA 259 | UUACCUGCCCACUGUUAGCC | 491 | NGG | TGFbR2 ABE | |
| sgRNA 260 | CCCGCUACAGGGCAUCCAGA | 492 | NGG | TGFbR2 ABE | |
| sgRNA 261 | GUUUUACAGACAAUGGUACU | 493 | NGG | TGFbR1 ABE | |
| sgRNA 262 | CUUGUAGGCCUUGAGAGUAA | 494 | NGG | TGFbR1 ABE | |
| sgRNA 263 | UGAAGCGUUCUGCCACACAC | 495 | NGG | TGFbR2 | |
| | | | | neighboring | |
| | | | | Kinase domain | |
| sgRNA 264 | UGGAAGAUGCUGCUUCUCCAAA | 496 | ATTN | TGFbR2 | Ex2 |
| | | | | | Cas12b |
| sgRNA 265 | UGAAGGAAAAAAAAAAGCCUGG | 497 | ATTN | TGFbR2 | Ex 2 |
| | | | | | Cas12b |
| sgRNA 266 | CACUCAUCAGAGCUACAGGAAC | 498 | ATTN | TGFbR2 | Ex2 |
| | | | | | Cas12b |
| sgRNA 267 | CAAGUGACAGGCAUCAGCCUCC | 499 | ATTN | TGFbR2 | Ex3 |
| | | | | | Cas12b |
| sgRNA 268 | CUCACCUCCACAGUGAUCACAC | 500 | ATTN | TGFbR2 | Ex3 |
| | | | | | Cas12b |
| sgRNA 269 | AUGUCUGAGAAGAUGUCCUUCU | 501 | ATTN | TGFbR2 | Ex3 |
| | | | | | Cas12b |
| sgRNA 270 | UAGGACUUCUGGAGCCAUGUAU | 502 | ATTN | TGFbR2 | Ex 4 |
| | | | | | Cas12b |
| sgRNA 271 | GGAGAAUGUUGAGUCCUUCAAG | 503 | ATTN | TGFbR2 | Ex4 |
| | | | | | Cas12b |
| sgRNA 272 | CCCAGAGCACCAGAGCCAUGGA | 504 | ATTN | TGFbR2 | Ex4 |
| | | | | | Cas12b |
| sgRNA 273 | UGAGCCUCCAUUUGGUUCCAAG | 505 | ATTN | TGFbR2 | Ex5 |
| | | | | | Cas12b |
| sgRNA 274 | CUGGUCGCCCUCGAUCUCUCAA | 506 | ATTN | TGFbR2 | Ex5 |
| | | | | | Cas12b |
| sgRNA 275 | CCAGCUUCUGGCUCAACCACCA | 507 | ATTN | TGFbR2 | Ex5 |
| | | | | | Cas12b |
| TSBTx2043 | UCUCCCCAGGUACAAUGGCU | 508 | TGG | A2AR | ABE8.20 |
| (sgRNA 155) | | | | | |
| TSBTx2042 | CUGCUCACCGGAGCGGGAUG | 509 | CGG | A2AR | CBE |
| (sgRNA 145) | | | | | |
| TSBTx2040 | UUUCAGAACUACAGUUCCUG | 510 | AGG | HIF1a | ABE8.20 |
| (sgRNA 173) | | | | | |
| TSBTx4073 | CUGGAUUACCUCUUGCCCUC | 511 | AGG | CD3e (CD3ϵ) | ABE8.20 |
| (gRNA 566) | | | | | |
| TSBTx760 | CUUACCCCACUUAACUAUCU | 512 | TGG | B2M | ABE8.20 |
| TSBTx763 | CACUCACCUUAGCCUGAGCA | 513 | GGG | CIITA | ABE8.20 |
| | | | | (exon 16 SD) | |
| TSBTx025 | CACCUACCUAAGAACCAUCC | 514 | TGG | PD1 (Exon 1) | ABE8.20 |
| TSBTx5277 | CCCAGAGCACCAGAGCCAUGGA | 515 | ATTT | TGFbR2 | Cas12b |
| (sgRCM272) | | | | | |

[0279] In some embodiments, provided herein is an immune cell with at least one modification in an endogenous gene (e.g., A2AR, A2BR, HIF1α, and HIF1α.I3) or regulatory elements thereof. In some embodiments, the immune cell may comprise a further modification in at least one, two, three, four, five, six, seven, eight, nine, ten, eleven, twelve, thirteen, fourteen, fifteen, sixteen, seventeen, eighteen, nineteen, twenty or more endogenous genes or regulatory elements thereof. In some embodiments, the at least one modification is a single nucleobase modification. In some embodiments, the at least one modification is implemented by base editing. The base editing may be positioned at any suitable position of the gene, or in a regulatory element of the gene. Thus, it may be appreciated that a single base editing at a start codon, for example, can completely abolish the expression of the gene. In some embodiments, the base editing may be performed at a splice donor and/or splice acceptor site. In some embodiments, the base editing is performed at multiple target sites. In some embodiments, the base editing may be performed at any exon of the multiple exons in a gene. In some embodiments, base editing may introduce a premature STOP codon into an exon, resulting in either lack of a translated product or in a truncated that may be misfolded and thereby eliminated by degradation, or may produce an unstable mRNA that is readily degraded. In some embodiments, the immune cell is a T cell. In some embodiments, the immune cell is a CAR-T cell. In some embodiments, the immune cell is a NK cell.

[0280] In some embodiments, a cell comprises not only alterations that reduce the expression of A2AR, A2BR, HIF1α, and HIF1α.I3, but also comprises an edited gene that is an immune response regulation gene, an immunogenic gene, a checkpoint inhibitor gene, a gene involved in immune responses, a cell surface marker, e.g. a T cell surface marker, or any combination thereof. In some embodiments, the edited gene is associated with activated T cell proliferation, alpha-beta T cell activation, gamma-delta T cell activation, positive regulation of T cell proliferation, negative regulation of T-helper cell proliferation or differentiation, or their regulatory elements thereof, or combinations thereof. In some embodiments, the edited gene may be a checkpoint inhibitor gene.

[0281] In some embodiments, the editing of the endogenous gene reduces expression of the gene. In some embodiments, the editing of the endogenous gene reduces expression of the gene by at least 50% as compared to a control cell without the modification. In some embodiments, the editing of the endogenous gene reduces expression of the gene by at least 60% as compared to a control cell without the modification. In some embodiments, the editing of the endogenous gene reduces expression of the gene by at least 70% as compared to a control cell without the modification. In some embodiments, the editing of the endogenous gene reduces expression of the gene by at least 80% as compared to a control cell without the modification. In some embodiments, the editing of the endogenous gene reduces expression of the gene by at least 90% as compared to a control cell without the modification. In some embodiments, the editing of the endogenous gene reduces expression of the gene by at least 100% as compared to a control cell without the modification. In some embodiments, the editing of the endogenous gene eliminates gene expression.

[0282] In some embodiments, base editing may be performed on an intron. For example, base editing may be performed on an intron of an A2AR, A2BR, HIF1α, and HIF1α.I3 gene. In some embodiments, the base editing may be performed at a site within an intron. In some embodiments, the base editing may be performed at sites in one or more introns. In some embodiments, the base editing may be performed at any exon of the multiple introns in a gene. In some embodiments, one or more base editing may be performed on an exon, an intron or any combination of exons and introns.

[0283] In some embodiments, the modification or base edit may be within a promoter site. In some embodiments, the base edit may be introduced within an alternative promoter site. In some embodiments, the base edit may be in a 5′ regulatory element, such as an enhancer. In some embodiment, base editing may be introduced to disrupt the binding site of a nucleic acid binding protein. Exemplary nucleic acid binding proteins may be a polymerase, nuclease, gyrase, topoisomerase, methylase or methyl transferase, transcription factors, enhancer, PABP, zinc finger proteins, among many others.

[0284] In some embodiments, base editing may be used for splice disruption to silence target protein expression (e.g., A2AR, A2BR, HIF1α, and HIF1α.I3 expression). In some embodiments, base editing may generate a splice acceptor-splice donor (SA-SD) site. Targeted base editing generating a SA-SD, or at a SA-SD site can result in reduced expression of a gene or polypeptide (e.g., A2AR, A2BR, HIF1α, and HIF1α.I3). In some embodiments, base editors (e.g., ABE, CBE) are used to target dinucleotide motifs that constitute splice acceptor and splice donor sites, which are the first and last two nucleotides of each intron. In some embodiments, splice disruption is achieved with an adenosine base editor (ABE). In some embodiments, splice disruption is achieved with a cytidine base editor (CBE). In some embodiments, base editors (e.g., ABE, CBE) are used to edit exons by creating STOP codons.

[0285] In some embodiments, provided herein is an immune cell with at least one modification in one or more endogenous genes. In some embodiments, the immune cell may have at least one modification in one, two, three, four, five, six, seven, eight, nine, ten, eleven, twelve, thirteen, fourteen, fifteen, sixteen, seventeen, eighteen, nineteen, twenty or more endogenous genes. In some embodiments, the modification generates a premature stop codon in the endogenous genes. In some embodiments, the STOP codon silences target protein expression. In some embodiments, the modification is a single base modification. In some embodiments, the modification is generated by base editing. The premature stop codon may be generated in an exon, an intron, or an untranslated region. In some embodiments, base editing may be used to introduce more than one STOP codon, in one or more alternative reading frames. In some embodiments, the stop codon is generated by a adenosine base editor (ABE). In some embodiments, the stop codon is generated by a cytidine base editor (CBE). In some embodiments, the CBE generates any one of the following edits (shown in underlined font) to generate a STOP codon: CAG→TAG; CAA→TAA; CGA→TGA; TGG→TGA; TGG→TAG; or TGG→TAA.

[0286] In some embodiments, the modification is a missense mutation. In some embodiments, the modification is in a peptide binding site, ATP binding site, splice site, promoter, enhancer, or in an untranslated region (UTR). In some embodiments, modification/base edits may be introduced at a 3′-UTR, for example, in a poly adenylation (poly-A) site. In some embodiments, base editing may be performed on a 5′-UTR region.

### Nucleobase Editors

[0287] Useful in the methods and compositions described herein are nucleobase editors that edit, modify or alter a target nucleotide sequence of a polynucleotide. Nucleobase editors described herein typically include a polynucleotide programmable nucleotide binding domain and a nucleobase editing domain (e.g., adenosine deaminase or cytidine deaminase). A polynucleotide programmable nucleotide binding domain, when in conjunction with a bound guide polynucleotide (e.g., gRNA), can specifically bind to a target polynucleotide sequence and thereby localize the base editor to the target nucleic acid sequence desired to be edited.

[0288] In certain embodiments, the nucleobase editors provided herein comprise one or more features that improve base editing activity. For example, any of the nucleobase editors provided herein may comprise a Cas9 domain that has reduced nuclease activity. In some embodiments, any of the nucleobase editors provided herein may have a Cas9 domain that does not have nuclease activity (dCas9), or a Cas9 domain that cuts one strand of a duplexed DNA molecule, referred to as a Cas9 nickase (nCas9). Without wishing to be bound by any particular theory, the presence of the catalytic residue (e.g., H840) maintains the activity of the Cas9 to cleave the non-edited (e.g., non-deaminated) strand opposite the targeted nucleobase. Mutation of the catalytic residue (e.g., D10 to A10) prevents cleavage of the edited (e.g., deaminated) strand containing the targeted residue (e.g., A or C). Such Cas9 variants can generate a single-strand DNA break (nick) at a specific location based on the gRNA-defined target sequence, leading to repair of the non-edited strand, ultimately resulting in a nucleobase change on the non-edited strand.

### Polynucleotide Programmable Nucleotide Binding Domain

[0289] Polynucleotide programmable nucleotide binding domains bind polynucleotides (e.g., RNA, DNA). A polynucleotide programmable nucleotide binding domain of a base editor can itself comprise one or more domains (e.g., one or more nuclease domains). In some embodiments, the nuclease domain of a polynucleotide programmable nucleotide binding domain can comprise an endonuclease or an exonuclease. An endonuclease can cleave a single strand of a double-stranded nucleic acid or both strands of a double-stranded nucleic acid molecule. In some embodiments, a nuclease domain of a polynucleotide programmable nucleotide binding domain can cut zero, one, or two strands of a target polynucleotide.

[0290] Non-limiting examples of a polynucleotide programmable nucleotide binding domain which can be incorporated into a base editor include a CRISPR protein-derived domain, a restriction nuclease, a meganuclease, TAL nuclease (TALEN), and a zinc finger nuclease (ZFN). In some embodiments, a base editor comprises a polynucleotide programmable nucleotide binding domain comprising a natural or modified protein or portion thereof which via a bound guide nucleic acid is capable of binding to a nucleic acid sequence during CRISPR (i.e., Clustered Regularly Interspaced Short Palindromic Repeats)-mediated modification of a nucleic acid. Such a protein is referred to herein as a “CRISPR protein.” Accordingly, disclosed herein is a base editor comprising a polynucleotide programmable nucleotide binding domain comprising all or a portion of a CRISPR protein (i.e. a base editor comprising as a domain all or a portion of a CRISPR protein, also referred to as a “CRISPR protein-derived domain” of the base editor). A CRISPR protein-derived domain incorporated into a base editor can be modified compared to a wild-type or natural version of the CRISPR protein. For example, as described below a CRISPR protein-derived domain can comprise one or more mutations, insertions, deletions, rearrangements and/or recombinations relative to a wild-type or natural version of the CRISPR protein.

[0291] Cas proteins that can be used herein include class 1 and class 2. Non-limiting examples of Cas proteins include Cas1, Cas1B, Cas2, Cas3, Cas4, Cas5, Cas5d, Cas5t, Cas5h, Cas5a, Cas6, Cas7, Cas8, Cas9 (also known as Csn1 or Csx12), Cas10, Csy1, Csy2, Csy3, Csy4, Cse1, Cse2, Cse3, Cse4, Cse5e, Csc1, Csc2, Csa5, Csn1, Csn2, Csm1, Csm2, Csm3, Csm4, Csm5, Csm6, Cmr1, Cmr3, Cmr4, Cmr5, Cmr6, Csb1, Csb2, Csb3, Csx17, Csx14, Csx10, Csx16, CsaX, Csx3, Csx1, Csx1S, Csf1, Csf2, CsO, Csf4, Csd1, Csd2, Cst1, Cst2, Csh1, Csh2, Csa1, Csa2, Csa3, Csa4, Csa5, Cas12a/Cpf1, Cas12b/C2c1 (e.g., SEQ ID NO: 232), Cas12c/C2c3, Cas12d/CasY, Cas12e/CasX, Cas12g, Cas12h, Cas12i, and Cas12j/CasΦ, CARF, DinG, homologues thereof, or modified versions thereof. A CRISPR enzyme can direct cleavage of one or both strands at a target sequence, such as within a target sequence and/or within a complement of a target sequence. For example, a CRISPR enzyme can direct cleavage of one or both strands within about 1, 2, 3, 4, 5, 6, 7, 8, 9, 10, 15, 20, 25, 50, 100, 200, 500, or more base pairs from the first or last nucleotide of a target sequence.

[0292] A vector that encodes a CRISPR enzyme that is mutated to with respect, to a corresponding wild-type enzyme such that the mutated CRISPR enzyme lacks the ability to cleave one or both strands of a target polynucleotide containing a target sequence can be used. A Cas protein (e.g., Cas9, Cas12) or a Cas domain (e.g., Cas9, Cas12) can refer to a polypeptide or domain with at least or at least about 50%, 60%, 70%, 80%, 90%, 91%, 92%, 93%, 94%, 95%, 96%, 97%, 98%, 99%, or 100% sequence identity and/or sequence homology to a wild-type exemplary Cas polypeptide or Cas domain. Cas (e.g., Cas9, Cas12) can refer to the wild-type or a modified form of the Cas protein that can comprise an amino acid change such as a deletion, insertion, substitution, variant, mutation, fusion, chimera, or any combination thereof.

[0293] In some embodiments, a CRISPR protein-derived domain of a base editor can include all or a portion of Cas9 from Corynebacterium ulcerans (NCBI Refs: NC_015683.1, NC_017317.1); Corynebacterium diphtheria (NCBI Refs: NC_016782.1, NC_016786.1); Spiroplasma syrphidicola (NCBI Ref: NC_021284.1); Prevotella intermedia (NCBI Ref: NC_017861.1); Spiroplasma taiwanense (NCBI Ref: NC_021846.1); Streptococcus iniae (NCBI Ref: NC_021314.1); Belliella baltica (NCBI Ref: NC_018010.1); Psychroflexus torquis (NCBI Ref: NC_018721.1); Streptococcus thermophilus (NCBI Ref: YP_820832.1); Listeria innocua (NCBI Ref: NP_472073.1); Campylobacter jejuni (NCBI Ref: YP_002344900.1); Neisseria meningitidis (NCBI Ref: YP_002342100.1), Streptococcus pyogenes, or Staphylococcus aureus.

[0294] Cas9 nuclease sequences and structures are well known to those of skill in the art (See, e.g., “Complete genome sequence of an Ml strain of Streptococcus pyogenes.” Ferretti et al., Proc. Natl. Acad. Sci. U.S.A. 98:4658-4663(2001); “CRISPR RNA maturation by trans-encoded small RNA and host factor RNase III.” Deltcheva E., et al., Nature 471:602-607(2011); and “A programmable dual-RNA-guided DNA endonuclease in adaptive bacterial immunity.” Jinek M., et al., Science 337:816-821(2012), the entire contents of each of which are incorporated herein by reference). Cas9 orthologs have been described in various species, including, but not limited to, S. pyogenes and S. thermophilus. Additional suitable Cas9 nucleases and sequences will be apparent to those of skill in the art based on this disclosure, and such Cas9 nucleases and sequences include Cas9 sequences from the organisms and loci disclosed in Chylinski, Rhun, and Charpentier, “The tracrRNA and Cas9 families of type II CRISPR-Cas immunity systems” (2013) RNA Biology 10:5, 726-737; the entire contents of which are incorporated herein by reference.

### High Fidelity Cas9 Domains

[0295] Some aspects of the disclosure provide high fidelity Cas9 domains. High fidelity Cas9 domains are known in the art and described, for example, in Kleinstiver, B. P., et al. “High-fidelity CRISPR-Cas9 nucleases with no detectable genome-wide off-target effects.” Nature 529, 490-495 (2016); and Slaymaker, I. M., et al. “Rationally engineered Cas9 nucleases with improved specificity.” Science 351, 84-88 (2015); the entire contents of each of which are incorporated herein by reference. An Exemplary high fidelity Cas9 domain is provided in the Sequence Listing as SEQ ID NO: 233. In some embodiments, high fidelity Cas9 domains are engineered Cas9 domains comprising one or more mutations that decrease electrostatic interactions between the Cas9 domain and the sugar-phosphate backbone of a DNA, relative to a corresponding wild-type Cas9 domain. High fidelity Cas9 domains that have decreased electrostatic interactions with the sugar-phosphate backbone of DNA have less off-target effects. In some embodiments, the Cas9 domain (e.g., a wild type Cas9 domain (SEQ ID NOs: 197 and 200) comprises one or more mutations that decrease the association between the Cas9 domain and the sugar-phosphate backbone of a DNA. In some embodiments, a Cas9 domain comprises one or more mutations that decreases the association between the Cas9 domain and the sugar-phosphate backbone of DNA by at least 1%, at least 2%, at least 3%, at least 4%, at least 5%, at least 10%, at least 15%, at least 20%, at least 25%, at least 30%, at least 35%, at least 40%, at least 45%, at least 50%, at least 55%, at least 60%, at least 65%, or at least 70%.

[0296] In some embodiments, any of the Cas9 fusion proteins provided herein comprise one or more of a D10A, N497X, a R661X, a Q695X, and/or a Q926X mutation, or a corresponding mutation in any of the amino acid sequences provided herein, wherein X is any amino acid. In some embodiments, the high fidelity Cas9 enzyme is SpCas9(K855A), eSpCas9(1.1), SpCas9-HF1, or hyper accurate Cas9 variant (HypaCas9). In some embodiments, the modified Cas9 eSpCas9(1.1) contains alanine substitutions that weaken the interactions between the HNH/RuvC groove and the non-target DNA strand, preventing strand separation and cutting at off-target sites. Similarly, SpCas9-HF1 lowers off-target editing through alanine substitutions that disrupt Cas9's interactions with the DNA phosphate backbone. HypaCas9 contains mutations (SpCas9 N692A/M694A/Q695A/H698A) in the REC3 domain that increase Cas9 proofreading and target discrimination. All three high fidelity enzymes generate less off-target editing than wildtype Cas9.

Cas9 Domains with Reduced Exclusivity

[0297] Typically, Cas9 proteins, such as Cas9 from S. pyogenes (spCas9), require a “protospacer adjacent motif (PAM)” or PAM-like motif, which is a 2-6 base pair DNA sequence immediately following the DNA sequence targeted by the Cas9 nuclease in the CRISPR bacterial adaptive immune system. The presence of an NGG PAM sequence is required to bind a particular nucleic acid region, where the “N” in “NGG” is adenosine (A), thymidine (T), or cytosine (C), and the G is guanosine. This may limit the ability to edit desired bases within a genome. In some embodiments, the base editing fusion proteins provided herein may need to be placed at a precise location, for example a region comprising a target base that is upstream of the PAM. See e.g., Komor, A. C., et al., “Programmable editing of a target base in genomic DNA without double-stranded DNA cleavage” Nature 533, 420-424 (2016), the entire contents of which are hereby incorporated by reference. Exemplary polypeptide sequences for spCas9 proteins capable of binding a PAM sequence are provided in the Sequence Listing as SEQ ID NOs: 197, 201, and 234-237. Accordingly, in some embodiments, any of the fusion proteins provided herein may contain a Cas9 domain that is capable of binding a nucleotide sequence that does not contain a canonical (e.g., NGG) PAM sequence. Cas9 domains that bind to non-canonical PAM sequences have been described in the art and would be apparent to the skilled artisan. For example, Cas9 domains that bind non-canonical PAM sequences have been described in Kleinstiver, B. P., et al., “Engineered CRISPR-Cas9 nucleases with altered PAM specificities” Nature 523, 481-485 (2015); and Kleinstiver, B. P., et al., “Broadening the targeting range of Staphylococcus aureus CRISPR-Cas9 by modifying PAM recognition” Nature Biotechnology 33, 1293-1298 (2015); the entire contents of each are hereby incorporated by reference.

### Nickases

[0298] In some embodiments, the polynucleotide programmable nucleotide binding domain can comprise a nickase domain. Herein the term “nickase” refers to a polynucleotide programmable nucleotide binding domain comprising a nuclease domain that is capable of cleaving only one strand of the two strands in a duplexed nucleic acid molecule (e.g., DNA). In some embodiments, a nickase can be derived from a fully catalytically active (e.g., natural) form of a polynucleotide programmable nucleotide binding domain by introducing one or more mutations into the active polynucleotide programmable nucleotide binding domain. For example, where a polynucleotide programmable nucleotide binding domain comprises a nickase domain derived from Cas9, the Cas9-derived nickase domain can include a D10A mutation and a histidine at position 840. In such embodiments, the residue H840 retains catalytic activity and can thereby cleave a single strand of the nucleic acid duplex. In another example, a Cas9-derived nickase domain can comprise an H840A mutation, while the amino acid residue at position 10 remains a D. In some embodiments, a nickase can be derived from a fully catalytically active (e.g., natural) form of a polynucleotide programmable nucleotide binding domain by removing all or a portion of a nuclease domain that is not required for the nickase activity. For example, where a polynucleotide programmable nucleotide binding domain comprises a nickase domain derived from Cas9, the Cas9-derived nickase domain can comprise a deletion of all or a portion of the RuvC domain or the HNH domain.

[0299] In some embodiments, wild-type Cas9 corresponds to, or comprises the following amino acid sequence:

(SEQ ID NO: 197)
[sequence omitted]

(single underline: HNH domain; double underline: RuvC domain).

[0300] In some embodiments, the strand of a nucleic acid duplex target polynucleotide sequence that is cleaved by a base editor comprising a nickase domain (e.g., Cas9-derived nickase domain, Cas12-derived nickase domain) is the strand that is not edited by the base editor (i.e., the strand that is cleaved by the base editor is opposite to a strand comprising a base to be edited). In other embodiments, a base editor comprising a nickase domain (e.g., Cas9-derived nickase domain, Cas12-derived nickase domain) can cleave the strand of a DNA molecule which is being targeted for editing. In such embodiments, the non-targeted strand is not cleaved.

[0301] In some embodiments, a Cas9 nuclease has an inactive (e.g., an inactivated) DNA cleavage domain, that is, the Cas9 is a nickase, referred to as an “nCas9” protein (for “nickase” Cas9). The Cas9 nickase may be a Cas9 protein that is capable of cleaving only one strand of a duplexed nucleic acid molecule (e.g., a duplexed DNA molecule). In some embodiments the Cas9 nickase cleaves the target strand of a duplexed nucleic acid molecule, meaning that the Cas9 nickase cleaves the strand that is base paired to (complementary to) a gRNA (e.g., an sgRNA) that is bound to the Cas9. In some embodiments, a Cas9 nickase comprises a D10A mutation and has a histidine at position 840. In some embodiments the Cas9 nickase cleaves the non-target, non-base-edited strand of a duplexed nucleic acid molecule, meaning that the Cas9 nickase cleaves the strand that is not base paired to a gRNA (e.g., an sgRNA) that is bound to the Cas9. In some embodiments, a Cas9 nickase comprises an H840A mutation and has an aspartic acid residue at position 10, or a corresponding mutation. In some embodiments the Cas9 nickase comprises an amino acid sequence that is at least 60%, at least 65%, at least 70%, at least 75%, at least 80%, at least 85%, at least 90%, at least 95%, at least 96%, at least 97%, at least 98%, at least 99%, or at least 99.5% identical to any one of the Cas9 nickases provided herein. Additional suitable Cas9 nickases will be apparent to those of skill in the art based on this disclosure and knowledge in the field, and are within the scope of this disclosure.

[0302] The amino acid sequence of an exemplary catalytically Cas9 nickase (nCas9) is as follows:

(SEQ ID NO: 201)
MDKKYSIGLAIGTNSVGWAVITDEYKVPSKKFKVLGNTDRHSIKKNLIGALLFDSGETAEATRL
KRTARRRYTRRKNRICYLQEIFSNEMAKVDDSFFHRLEESFLVEEDKKHERHPIFGNIVDEVAY
HEKYPTIYHLRKKLVDSTDKADLRLIYLALAHMIKFRGHFLIEGDLNPDNSDVDKLFIQLVQTY
NQLFEENPINASGVDAKAILSARLSKSRRLENLIAQLPGEKKNGLFGNLIALSLGLTPNFKSNF
DLAEDAKLQLSKDTYDDDLDNLLAQIGDQYADLFLAAKNLSDAILLSDILRVNTEITKAPLSAS
MIKRYDEHHQDLTLLKALVRQQLPEKYKEIFFDQSKNGYAGYIDGGASQEEFYKFIKPILEKMD
GTEELLVKLNREDLLRKQRTFDNGSIPHQIHLGELHAILRRQEDFYPFLKDNREKIEKILTFRI
PYYVGPLARGNSRFAWMTRKSEETITPWNFEEVVDKGASAQSFIERMTNFDKNLPNEKVLPKHS
LLYEYFTVYNELTKVKYVTEGMRKPAFLSGEQKKAIVDLLFKTNRKVTVKQLKEDYFKKIECFD
SVEISGVEDRFNASLGTYHDLLKIIKDKDFLDNEENEDILEDIVLTLTLFEDREMIEERLKTYA
HLFDDKVMKQLKRRRYTGWGRLSRKLINGIRDKQSGKTILDFLKSDGFANRNFMQLIHDDSLTF
KEDIQKAQVSGQGDSLHEHIANLAGSPAIKKGILQTVKVVDELVKVMGRHKPENIVIEMARENQ
TTQKGQKNSRERMKRIEEGIKELGSQILKEHPVENTQLQNEKLYLYYLQNGRDMYVDQELDINR
LSDYDVDHIVPQSFLKDDSIDNKVLTRSDKNRGKSDNVPSEEVVKKMKNYWRQLLNAKLITQRK
FDNLTKAERGGLSELDKAGFIKRQLVETRQITKHVAQILDSRMNTKYDENDKLIREVKVITLKS
KLVSDFRKDFQFYKVREINNYHHAHDAYLNAVVGTALIKKYPKLESEFVYGDYKVYDVRKMIAK
SEQEIGKATAKYFFYSNIMNFFKTEITLANGEIRKRPLIETNGETGEIVWDKGRDFATVRKVLS
MPQVNIVKKTEVQTGGFSKESILPKRNSDKLIARKKDWDPKKYGGFDSPTVAYSVLVVAKVEKG
KSKKLKSVKELLGITIMERSSFEKNPIDFLEAKGYKEVKKDLIIKLPKYSLFELENGRKRMLAS
AGELQKGNELALPSKYVNFLYLASHYEKLKGSPEDNEQKQLFVEQHKHYLDEIIEQISEFSKRV
ILADANLDKVLSAYNKHRDKPIREQAENIIHLFTLTNLGAPAAFKYFDTTIDRKRYTSTKEVLD
ATLIHQSITGLYETRIDLSQLGGD

[0303] The Cas9 nuclease has two functional endonuclease domains: RuvC and HNH. Cas9 undergoes a conformational change upon target binding that positions the nuclease domains to cleave opposite strands of the target DNA. The end result of Cas9-mediated DNA cleavage is a double-strand break (DSB) within the target DNA (˜3-4 nucleotides upstream of the PAM sequence). The resulting DSB is then repaired by one of two general repair pathways: (1) the efficient but error-prone non-homologous end joining (NHEJ) pathway; or (2) the less efficient but high-fidelity homology directed repair (HDR) pathway.

[0304] The “efficiency” of non-homologous end joining (NHEJ) and/or homology directed repair (HDR) can be calculated by any convenient method. For example, in some embodiments, efficiency can be expressed in terms of percentage of successful HDR. For example, a surveyor nuclease assay can be used to generate cleavage products and the ratio of products to substrate can be used to calculate the percentage. For example, a surveyor nuclease enzyme can be used that directly cleaves DNA containing a newly integrated restriction sequence as the result of successful HDR. More cleaved substrate indicates a greater percent HDR (a greater efficiency of HDR). As an illustrative example, a fraction (percentage) of HDR can be calculated using the following equation [(cleavage products)/(substrate plus cleavage products)] (e.g., (b+c)/(a+b+c), where “a” is the band intensity of DNA substrate and “b” and “c” are the cleavage products).

[0305] In some embodiments, efficiency can be expressed in terms of percentage of successful NHEJ. For example, a T7 endonuclease I assay can be used to generate cleavage products and the ratio of products to substrate can be used to calculate the percentage NHEJ. T7 endonuclease I cleaves mismatched heteroduplex DNA which arises from hybridization of wild-type and mutant DNA strands (NHEJ generates small random insertions or deletions (indels) at the site of the original break). More cleavage indicates a greater percent NHEJ (a greater efficiency of NHEJ). As an illustrative example, a fraction (percentage) of NHEJ can be calculated using the following equation: (1−(1−(b+c)/(a+b+c))^{1/2})×100, where “a” is the band intensity of DNA substrate and “b” and “c” are the cleavage products (Ran et. al., Cell. 2013 Sep. 12; 154(6):1380-9; and Ran et al., Nat Protoc. 2013 November; 8(11): 2281-2308).

[0306] The NHEJ repair pathway is the most active repair mechanism, and it frequently causes small nucleotide insertions or deletions (indels) at the DSB site. The randomness of NHEJ-mediated DSB repair has important practical implications, because a population of cells expressing Cas9 and a gRNA or a guide polynucleotide can result in a diverse array of mutations. In most embodiments, NHEJ gives rise to small indels in the target DNA that result in amino acid deletions, insertions, or frameshift mutations leading to premature stop codons within the open reading frame (ORF) of the targeted gene. The ideal end result is a loss-of-function mutation within the targeted gene.

[0307] While NHEJ-mediated DSB repair often disrupts the open reading frame of the gene, homology directed repair (HDR) can be used to generate specific nucleotide changes ranging from a single nucleotide change to large insertions like the addition of a fluorophore or tag.

[0308] In order to utilize HDR for gene editing, a DNA repair template containing the desired sequence can be delivered into the cell type of interest with the gRNA(s) and Cas9 or Cas9 nickase. The repair template can contain the desired edit as well as additional homologous sequence immediately upstream and downstream of the target (termed left & right homology arms). The length of each homology arm can be dependent on the size of the change being introduced, with larger insertions requiring longer homology arms. The repair template can be a single-stranded oligonucleotide, double-stranded oligonucleotide, or a double-stranded DNA plasmid. The efficiency of HDR is generally low (<10% of modified alleles) even in cells that express Cas9, gRNA and an exogenous repair template. The efficiency of HDR can be enhanced by synchronizing the cells, since HDR takes place during the S and G2 phases of the cell cycle. Chemically or genetically inhibiting genes involved in NHEJ can also increase HDR frequency.

[0309] In some embodiments, Cas9 is a modified Cas9. A given gRNA targeting sequence can have additional sites throughout the genome where partial homology exists. These sites are called off-targets and need to be considered when designing a gRNA. In addition to optimizing gRNA design, CRISPR specificity can also be increased through modifications to Cas9. Cas9 generates double-strand breaks (DSBs) through the combined activity of two nuclease domains, RuvC and HNH. Cas9 nickase, a D10A mutant of SpCas9, retains one nuclease domain and generates a DNA nick rather than a DSB. The nickase system can also be combined with HDR-mediated gene editing for specific gene edits.

### Catalytically Dead Nucleases

[0310] Also provided herein are base editors comprising a polynucleotide programmable nucleotide binding domain which is catalytically dead (i.e., incapable of cleaving a target polynucleotide sequence). Herein the terms “catalytically dead” and “nuclease dead” are used interchangeably to refer to a polynucleotide programmable nucleotide binding domain which has one or more mutations and/or deletions resulting in its inability to cleave a strand of a nucleic acid. In some embodiments, a catalytically dead polynucleotide programmable nucleotide binding domain base editor can lack nuclease activity as a result of specific point mutations in one or more nuclease domains. For example, in the case of a base editor comprising a Cas9 domain, the Cas9 can comprise both a D10A mutation and an H840A mutation. Such mutations inactivate both nuclease domains, thereby resulting in the loss of nuclease activity. In other embodiments, a catalytically dead polynucleotide programmable nucleotide binding domain can comprise one or more deletions of all or a portion of a catalytic domain (e.g., RuvC1 and/or HNH domains). In further embodiments, a catalytically dead polynucleotide programmable nucleotide binding domain comprises a point mutation (e.g., D10A or H840A) as well as a deletion of all or a portion of a nuclease domain. dCas9 domains are known in the art and described, for example, in Qi et al., “Repurposing CRISPR as an RNA-guided platform for sequence-specific control of gene expression.” Cell. 2013; 152(5):1173-83, the entire contents of which are incorporated herein by reference.

[0311] Additional suitable nuclease-inactive dCas9 domains will be apparent to those of skill in the art based on this disclosure and knowledge in the field, and are within the scope of this disclosure. Such additional exemplary suitable nuclease-inactive Cas9 domains include, but are not limited to, D10A/H840A, D10A/D839A/H840A, and D10A/D839A/H840A/N863A mutant domains (See, e.g., Prashant et al., CAS9 transcriptional activators for target specificity screening and paired nickases for cooperative genome engineering. Nature Biotechnology. 2013; 31(9): 833-838, the entire contents of which are incorporated herein by reference).

[0312] In some embodiments, dCas9 corresponds to, or comprises in part or in whole, a Cas9 amino acid sequence having one or more mutations that inactivate the Cas9 nuclease activity. In some embodiments, the nuclease-inactive dCas9 domain comprises a D10X mutation and a H840X mutation of the amino acid sequence set forth herein, or a corresponding mutation in any of the amino acid sequences provided herein, wherein X is any amino acid change. In some embodiments, the nuclease-inactive dCas9 domain comprises a D10A mutation and a H840A mutation of the amino acid sequence set forth herein, or a corresponding mutation in any of the amino acid sequences provided herein. In some embodiments, a nuclease-inactive Cas9 domain comprises the amino acid sequence set forth in Cloning vector pPlatTET-gRNA2 (Accession No. BAV54124).

[0313] In some embodiments, a variant Cas9 protein can cleave the complementary strand of a guide target sequence but has reduced ability to cleave the non-complementary strand of a double stranded guide target sequence. For example, the variant Cas9 protein can have a mutation (amino acid substitution) that reduces the function of the RuvC domain. As a non-limiting example, in some embodiments, a variant Cas9 protein has a D10A (aspartate to alanine at amino acid position 10) and can therefore cleave the complementary strand of a double stranded guide target sequence but has reduced ability to cleave the non-complementary strand of a double stranded guide target sequence (thus resulting in a single strand break (SSB) instead of a double strand break (DSB) when the variant Cas9 protein cleaves a double stranded target nucleic acid) (see, for example, Jinek et al., Science. 2012 Aug. 17; 337(6096):816-21).

[0314] In some embodiments, a variant Cas9 protein can cleave the non-complementary strand of a double stranded guide target sequence but has reduced ability to cleave the complementary strand of the guide target sequence. For example, the variant Cas9 protein can have a mutation (amino acid substitution) that reduces the function of the HNH domain (RuvC/HNH/RuvC domain motifs). As a non-limiting example, in some embodiments, the variant Cas9 protein has an H840A (histidine to alanine at amino acid position 840) mutation and can therefore cleave the non-complementary strand of the guide target sequence but has reduced ability to cleave the complementary strand of the guide target sequence (thus resulting in a SSB instead of a DSB when the variant Cas9 protein cleaves a double stranded guide target sequence). Such a Cas9 protein has a reduced ability to cleave a guide target sequence (e.g., a single stranded guide target sequence) but retains the ability to bind a guide target sequence (e.g., a single stranded guide target sequence).

[0315] As another non-limiting example, in some embodiments, the variant Cas9 protein harbors W476A and W1126A mutations such that the polypeptide has a reduced ability to cleave a target DNA. Such a Cas9 protein has a reduced ability to cleave a target DNA (e.g., a single stranded target DNA) but retains the ability to bind a target DNA (e.g., a single stranded target DNA).

[0316] As another non-limiting example, in some embodiments, the variant Cas9 protein harbors P475A, W476A, N477A, D1125A, W1126A, and D1127A mutations such that the polypeptide has a reduced ability to cleave a target DNA. Such a Cas9 protein has a reduced ability to cleave a target DNA (e.g., a single stranded target DNA) but retains the ability to bind a target DNA (e.g., a single stranded target DNA).

[0317] As another non-limiting example, in some embodiments, the variant Cas9 protein harbors H840A, W476A, and W1126A, mutations such that the polypeptide has a reduced ability to cleave a target DNA. Such a Cas9 protein has a reduced ability to cleave a target DNA (e.g., a single stranded target DNA) but retains the ability to bind a target DNA (e.g., a single stranded target DNA). As another non-limiting example, in some embodiments, the variant Cas9 protein harbors H840A, D10A, W476A, and W1126A, mutations such that the polypeptide has a reduced ability to cleave a target DNA. Such a Cas9 protein has a reduced ability to cleave a target DNA (e.g., a single stranded target DNA) but retains the ability to bind a target DNA (e.g., a single stranded target DNA). In some embodiments, the variant Cas9 has restored catalytic His residue at position 840 in the Cas9 HNH domain (A840H).

[0318] As another non-limiting example, in some embodiments, the variant Cas9 protein harbors, H840A, P475A, W476A, N477A, D1125A, W1126A, and D1127A mutations such that the polypeptide has a reduced ability to cleave a target DNA. Such a Cas9 protein has a reduced ability to cleave a target DNA (e.g., a single stranded target DNA) but retains the ability to bind a target DNA (e.g., a single stranded target DNA). As another non-limiting example, in some embodiments, the variant Cas9 protein harbors D10A, H840A, P475A, W476A, N477A, D1125A, W1126A, and D1127A mutations such that the polypeptide has a reduced ability to cleave a target DNA. Such a Cas9 protein has a reduced ability to cleave a target DNA (e.g., a single stranded target DNA) but retains the ability to bind a target DNA (e.g., a single stranded target DNA). In some embodiments, when a variant Cas9 protein harbors W476A and W1126A mutations or when the variant Cas9 protein harbors P475A, W476A, N477A, D1125A, W1126A, and D1127A mutations, the variant Cas9 protein does not bind efficiently to a PAM sequence. Thus, in some such embodiments, when such a variant Cas9 protein is used in a method of binding, the method does not require a PAM sequence. In other words, in some embodiments, when such a variant Cas9 protein is used in a method of binding, the method can include a guide RNA, but the method can be performed in the absence of a PAM sequence (and the specificity of binding is therefore provided by the targeting segment of the guide RNA). Other residues can be mutated to achieve the above effects (i.e., inactivate one or the other nuclease portions). As non-limiting examples, residues D10, G12, G17, E762, H840, N854, N863, H982, H983, A984, D986, and/or A987 can be altered (i.e., substituted). Also, mutations other than alanine substitutions are suitable.

[0319] In some embodiments, a variant Cas9 protein that has reduced catalytic activity (e.g., when a Cas9 protein has a D10, G12, G17, E762, H840, N854, N863, H982, H983, A984, D986, and/or a A987 mutation, e.g., D10A, G12A, G17A, E762A, H840A, N854A, N863A, H982A, H983A, A984A, and/or D986A), the variant Cas9 protein can still bind to target DNA in a site-specific manner (because it is still guided to a target DNA sequence by a guide RNA) as long as it retains the ability to interact with the guide RNA.

[0320] In some embodiments, the variant Cas protein can be spCas9, spCas9-VRQR, spCas9-VRER, xCas9 (sp), saCas9, saCas9-KKH, spCas9-MQKSER, spCas9-LRKIQK, or spCas9-LRVSQL.

[0321] In some embodiments, the Cas9 domain is a Cas9 domain from Staphylococcus aureus (SaCas9). In some embodiments, the SaCas9 domain is a nuclease active SaCas9, a nuclease inactive SaCas9 (SaCas9d), or a SaCas9 nickase (SaCas9n). In some embodiments, the SaCas9 comprises a N579A mutation, or a corresponding mutation in any of the amino acid sequences provided in the Sequence Listing submitted herewith.

[0322] In some embodiments, the SaCas9 domain, the SaCas9d domain, or the SaCas9n domain can bind to a nucleic acid sequence having a non-canonical PAM. In some embodiments, the SaCas9 domain, the SaCas9d domain, or the SaCas9n domain can bind to a nucleic acid sequence having a NNGRRT or a NNGRRV PAM sequence. In some embodiments, the SaCas9 domain comprises one or more of a E781X, a N967X, and a R1014X mutation, or a corresponding mutation in any of the amino acid sequences provided herein, wherein X is any amino acid. In some embodiments, the SaCas9 domain comprises one or more of a E781K, a N967K, and a R1014H mutation, or one or more corresponding mutation in any of the amino acid sequences provided herein. In some embodiments, the SaCas9 domain comprises a E781K, a N967K, or a R1014H mutation, or corresponding mutations in any of the amino acid sequences provided herein.

[0323] In some embodiments, one of the Cas9 domains present in the fusion protein may be replaced with a guide nucleotide sequence-programmable DNA-binding protein domain that has no requirements for a PAM sequence. In some embodiments, the Cas9 is an SaCas9. Residue A579 of SaCas9 can be mutated from N579 to yield a SaCas9 nickase. Residues K781, K967, and H1014 can be mutated from E781, N967, and R1014 to yield a SaKKH Cas9.

[0324] In some embodiments, a modified SpCas9 including amino acid substitutions D1135M, S1136Q, G1218K, E1219F, A1322R, D1332A, R1335E, and T1337R (SpCas9-MQKFRAER) and having specificity for the altered PAM 5′-NGC-3′ was used.

[0325] Alternatives to S. pyogenes Cas9 can include RNA-guided endonucleases from the Cpf1 family that display cleavage activity in mammalian cells. CRISPR from Prevotella and Francisella 1 (CRISPR/Cpf1) is a DNA-editing technology analogous to the CRISPR/Cas9 system. Cpf1 is an RNA-guided endonuclease of a class II CRISPR/Cas system. This acquired immune mechanism is found in Prevotella and Francisella bacteria. Cpf1 genes are associated with the CRISPR locus, coding for an endonuclease that use a guide RNA to find and cleave viral DNA. Cpf1 is a smaller and simpler endonuclease than Cas9, overcoming some of the CRISPR/Cas9 system limitations. Unlike Cas9 nucleases, the result of Cpfi-mediated DNA cleavage is a double-strand break with a short 3′ overhang. Cpf1's staggered cleavage pattern can open up the possibility of directional gene transfer, analogous to traditional restriction enzyme cloning, which can increase the efficiency of gene editing. Like the Cas9 variants and orthologues described above, Cpf1 can also expand the number of sites that can be targeted by CRISPR to AT-rich regions or AT-rich genomes that lack the NGG PAM sites favored by SpCas9. The Cpf1 locus contains a mixed alpha/beta domain, a RuvC-I followed by a helical region, a RuvC-II and a zinc finger-like domain. The Cpf1 protein has a RuvC-like endonuclease domain that is similar to the RuvC domain of Cas9.

[0326] Furthermore, Cpf1, unlike Cas9, does not have a HNH endonuclease domain, and the N-terminal of Cpf1 does not have the alpha-helical recognition lobe of Cas9. Cpf1 CRISPR-Cas domain architecture shows that Cpf1 is functionally unique, being classified as Class 2, type V CRISPR system. The Cpf1 loci encode Cas1, Cas2 and Cas4 proteins that are more similar to types I and III than type II systems. Functional Cpf1 does not require the trans-activating CRISPR RNA (tracrRNA), therefore, only CRISPR (crRNA) is required. This benefits genome editing because Cpf1 is not only smaller than Cas9, but also it has a smaller sgRNA molecule (approximately half as many nucleotides as Cas9). The Cpf1-crRNA complex cleaves target DNA or RNA by identification of a protospacer adjacent motif 5′-YTN-3′ or 5′-TTN-3′ in contrast to the G-rich PAM targeted by Cas9. After identification of PAM, Cpf1 introduces a sticky-end-like DNA double-stranded break having an overhang of 4 or 5 nucleotides.

[0327] In some embodiments, the Cas9 is a Cas9 variant having specificity for an altered PAM sequence. In some embodiments, the Additional Cas9 variants and PAM sequences are described in Miller, S. M., et al. Continuous evolution of SpCas9 variants compatible with non-G PAMs, Nat. Biotechnol. (2020), the entirety of which is incorporated herein by reference. in some embodiments, a Cas9 variate have no specific PAM requirements. In some embodiments, a Cas9 variant, e.g. a SpCas9 variant has specificity for a NRNH PAM, wherein R is A or G and H is A, C, or T. In some embodiments, the SpCas9 variant has specificity for a PAM sequence AAA, TAA, CAA, GAA, TAT, GAT, or CAC. In some embodiments, the SpCas9 variant comprises an amino acid substitution at position 1114, 1134, 1135, 1137, 1139, 1151, 1180, 1188, 1211, 1218, 1219, 1221, 1249, 1256, 1264, 1290, 1318, 1317, 1320, 1321, 1323, 1332, 1333, 1335, 1337, or 1339 or a corresponding position thereof. In some embodiments, the SpCas9 variant comprises an amino acid substitution at position 1114, 1135, 1218, 1219, 1221, 1249, 1320, 1321, 1323, 1332, 1333, 1335, or 1337 or a corresponding position thereof. In some embodiments, the SpCas9 variant comprises an amino acid substitution at position 1114, 1134, 1135, 1137, 1139, 1151, 1180, 1188, 1211, 1219, 1221, 1256, 1264, 1290, 1318, 1317, 1320, 1323, 1333 ora corresponding position thereof. In some embodiments, the SpCas9 variant comprises an amino acid substitution at position 1114, 1131, 1135, 1150, 1156, 1180, 1191, 1218, 1219, 1221, 1227, 1249, 1253, 1286, 1293, 1320, 1321, 1332, 1335, 1339 or a corresponding position thereof. In some embodiments, the SpCas9 variant comprises an amino acid substitution at position 1114, 1127, 1135, 1180, 1207, 1219, 1234, 1286, 1301, 1332, 1335, 1337, 1338, 1349 or a corresponding position thereof. Exemplary amino acid substitutions and PAM specificity of SpCas9 variants are shown in Tables 3A-3D.

TABLE 3A
SpCas9 Variants

| | SpCas9 amino acid position | | | | | | | | | | | | |
|---|---|---|---|---|---|---|---|---|---|---|---|---|---|
| | 1114 | 1135 | 1218 | 1219 | 1221 | 1249 | 1320 | 1321 | 1323 | 1332 | 1333 | 1335 | 1337 |
| PAM | R | D | G | E | Q | P | A | P | A | D | R | R | T |
| AAA | | N | | V | H | | | | | | G | | |
| AAA | | N | | V | H | | | | | | G | | |
| AAA | | | | V | | | | | | | G | | |
| TAA | G | N | | V | | | | | | | I | | |
| TAA | | N | | V | | | | | | | I | | A |
| TAA | G | N | | V | | | | | | | I | | A |
| CAA | | | | V | | | | | | | K | | |
| CAA | | N | | V | | | | | | | K | | |
| CAA | | N | | V | | | | | | | K | | |
| GAA | | | | V | H | | V | | | | K | | |
| GAA | | N | | V | | | V | | | | K | | |
| GAA | | | | V | H | | V | | | | K | | |
| TAT | | | S | V | H | S | | S | | | | L | |
| TAT | | | S | V | H | S | | S | | | | L | |
| TAT | | | S | V | H | S | | S | | | | L | |
| GAT | | | | V | | | | | | | I | | |
| GAT | | | | V | | | | | D | | | Q | |
| GAT | | | | V | | | | | D | | | Q | |
| CAC | | | | V | | | | | | N | | Q | N |
| CAC | | N | | V | | | | | | | | Q | N |
| CAC | | | | V | | | | | | N | | Q | N |

TABLE 3B

| | SpCas9 amino acid position | | | | | | | | | | | | | | | | | | |
|---|---|---|---|---|---|---|---|---|---|---|---|---|---|---|---|---|---|---|---|
| | 1114 | 1134 | 1135 | 1137 | 1139 | 1151 | 1180 | 1188 | 1211 | 1219 | 1221 | 1256 | 1264 | 1290 | 1318 | 1317 | 1320 | 1323 | 1333 |
| PAM | R | F | D | P | V | K | D | K | K | E | Q | Q | H | V | L | N | A | A | R |
| GAA | | | | | | | | | | V | H | | | | | | V | | K |
| GAA | | | N | S | | | | | | V | | | | | | | V | D | K |
| GAA | | | N | | | | | | | V | H | | Y | | | | V | | K |
| CAA | | | N | | | | | | | V | H | | Y | | | | V | | K |
| CAA | G | | N | S | | | | | | V | H | | Y | | | | V | | K |
| CAA | | | N | | | | | R | | V | H | | | | | | V | | K |
| CAA | | | N | | | | G | | R | V | H | | Y | | | | V | | K |
| CAA | | | N | | | | | | | V | H | | Y | | | | V | | K |
| AAA | | | N | | | | G | | | V | H | R | Y | | | | V | D | K |
| CAA | G | | N | | | | G | | | V | H | | Y | | | | V | D | K |
| CAA | | L | N | | | | G | | | V | H | | Y | | | T | V | D | K |
| TAA | G | | N | | | | G | | | V | H | | Y | G | S | | V | D | K |
| TAA | G | | N | | | E | G | | | V | H | | Y | | S | | V | | K |
| TAA | G | | N | | | | G | | | V | H | | Y | | S | | V | D | K |
| TAA | G | | N | | | | G | | R | V | H | | | | | | V | | K |
| TAA | | | N | | | | G | | R | V | H | | Y | | | | V | | K |
| TAA | G | | N | | A | | G | | | V | H | | | | | | V | | K |
| TAA | G | | N | | | | | | | V | H | | | | | | V | | K |

TABLE 3C

| | SpCas9 amino acid position | | | | | | | | | |
|---|---|---|---|---|---|---|---|---|---|---|
| | 1114 | 1131 | 1135 | 1150 | 1156 | 1180 | 1191 | 1218 | 1219 | 1221 |
| PAM | R | Y | D | E | K | D | K | G | E | Q |
| SacB.TAT | | | N | | | | N | | V | H |
| SacB.TAT | | | N | | | | | S | V | H |
| AAT | | | N | | | | | S | V | H |
| TAT | G | | N | | | G | | S | V | H |
| TAT | G | | N | | | G | | S | V | H |
| TAT | G | C | N | | | G | | S | V | H |
| TAT | G | C | N | | | G | | S | V | H |
| TAT | G | C | N | | | G | | S | V | H |
| TAT | G | C | N | | E | G | | S | V | H |
| TAT | G | C | N | V | | G | | S | V | H |
| TAT | | C | N | | | G | | S | V | H |
| TAT | G | C | N | | | G | | S | V | H |

| | SpCas9 amino acid position | | | | | | | | | |
|---|---|---|---|---|---|---|---|---|---|---|
| | 1227 | 1249 | 1253 | 1286 | 1293 | 1320 | 1321 | 1332 | 1335 | 1339 |
| PAM | A | P | E | N | A | A | P | D | R | T |
| SacB.TAT | | | | | | V | S | | L | |
| SacB.TAT | | S | | | | | S | G | L | |
| AAT | V | S | | K | T | | S | G | L | I |
| TAT | | S | K | | | | S | G | L | |
| TAT | | S | | | | | S | G | L | |
| TAT | | S | | | | | S | G | L | |
| TAT | | S | | | | | S | G | L | |
| TAT | | S | | | | | S | G | L | |
| TAT | | S | | | | | S | G | L | |
| TAT | | S | | | | | S | G | L | |
| TAT | | S | | | | | S | G | L | |
| TAT | | S | | | | | S | G | L | |

TABLE 3D

| | SpCas9 amino acid position | | | | | | | | | | | | | |
|---|---|---|---|---|---|---|---|---|---|---|---|---|---|---|
| | 1114 | 1127 | 1135 | 1180 | 1207 | 1219 | 1234 | 1286 | 1301 | 1332 | 1335 | 1337 | 1338 | 1349 |
| PAM | R | D | D | D | E | E | N | N | P | D | R | T | S | H |

| | | | | | | | | | | | | | |
|---|---|---|---|---|---|---|---|---|---|---|---|---|---|
| SacB.CAC | | | N | | | V | | | N | Q | N | | |
| AAC | G | | N | | | V | | | N | Q | N | | |
| AAC | G | | N | | | V | | | N | Q | N | | |
| TAC | G | | N | | | V | | | N | Q | N | | |
| TAC | G | | N | | | V | | H | N | Q | N | | |
| TAC | G | | N | | G | V | D | H | N | Q | N | | |
| TAC | G | | N | | | V | | | N | O | N | | |
| TAC | G | G | N | E | | V | | H | N | Q | N | | |
| TAC | G | | N | | | V | | H | N | Q | N | | |
| TAC | G | | N | | | V | | | N | Q | N | T | R |

[0328] Further exemplary Cas9 (e.g., SaCas9) polypeptides with modified PAM recognition are described in Kleinstiver, et al. “Broadening the targeting range of Staphylococcus aureus CRISPR-Cas9 by modifying PAM recognition,” Nature Biotechnology, 33:1293-1298 (2015) DOI: 10.1038/nbt.3404, the disclosure of which is incorporated herein by reference in its entirety for all purposes. In some embodiments, a Cas9 variant (e.g., a SaCas9 variant) comprising one or more of the alterations E782K, N929R, N968K, and/or R1015H has specificity for, or is associated with increased editing activities relative to a reference polypeptide (e.g., SaCas9) at an NNNRRT or NNHRRT PAM sequence, where N represents any nucleotide, H represents any nucleotide other than G (i.e., “not G”), and R represents a purine. In embodiments, the Cas9 variant (e.g., a SaCas9 variant) comprises the alterations E782K, N968K, and R1015H or the alterations E782K, K929R, and R1015H.

[0329] In some embodiments, the nucleic acid programmable DNA binding protein (napDNAbp) is a single effector of a microbial CRISPR-Cas system. Single effectors of microbial CRISPR-Cas systems include, without limitation, Cas9, Cpf1, Cas12b/C2c1, and Cas12c/C2c3. Typically, microbial CRISPR-Cas systems are divided into Class 1 and Class 2 systems. Class 1 systems have multisubunit effector complexes, while Class 2 systems have a single protein effector. For example, Cas9 and Cpf1 are Class 2 effectors. In addition to Cas9 and Cpf1, three distinct Class 2 CRISPR-Cas systems (Cas12b/C2c1, and Cas12c/C2c3) have been described by Shmakov et al., “Discovery and Functional Characterization of Diverse Class 2 CRISPR Cas Systems”, Mol. Cell, 2015 Nov. 5; 60(3): 385-397, the entire contents of which is hereby incorporated by reference. Effectors of two of the systems, Cas12b/C2c1, and Cas12c/C2c3, contain RuvC-like endonuclease domains related to Cpf1. A third system contains an effector with two predicated HEPN RNase domains. Production of mature CRISPR RNA is tracrRNA-independent, unlike production of CRISPR RNA by Cas12b/C2c1. Cas12b/C2c1 depends on both CRISPR RNA and tracrRNA for DNA cleavage.

[0330] In some embodiments, the napDNAbp is a circular permutant (e.g., SEQ ID NO: 238).

[0331] The crystal structure of Alicyclobaccillus acidoterrastris Cas12b/C2c1 (AacC2c1) has been reported in complex with a chimeric single-molecule guide RNA (sgRNA). See e.g., Liu et al., “C2c1-sgRNA Complex Structure Reveals RNA-Guided DNA Cleavage Mechanism”, Mol. Cell, 2017 Jan. 19; 65(2):310-322, the entire contents of which are hereby incorporated by reference. The crystal structure has also been reported in Alicyclobacillus acidoterrestris C2c1 bound to target DNAs as ternary complexes. See e.g., Yang et al., “PAM-dependent Target DNA Recognition and Cleavage by C2C1 CRISPR-Cas endonuclease”, Cell, 2016 Dec. 15; 167(7):1814-1828, the entire contents of which are hereby incorporated by reference. Catalytically competent conformations of AacC2c1, both with target and non-target DNA strands, have been captured independently positioned within a single RuvC catalytic pocket, with Cas12b/C2c1-mediated cleavage resulting in a staggered seven-nucleotide break of target DNA. Structural comparisons between Cas12b/C2c1 ternary complexes and previously identified Cas9 and Cpf1 counterparts demonstrate the diversity of mechanisms used by CRISPR-Cas9 systems.

[0332] In some embodiments, the nucleic acid programmable DNA binding protein (napDNAbp) of any of the fusion proteins provided herein may be a Cas12b/C2c1, or a Cas12c/C2c3 protein. In some embodiments, the napDNAbp is a Cas12b/C2c1 protein. In some embodiments, the napDNAbp is a Cas12c/C2c3 protein. In some embodiments, the napDNAbp comprises an amino acid sequence that is at least 85%, at least 90%, at least 91%, at least 92%, at least 93%, at least 94%, at least 95%, at least 96%, at least 97%, at least 98%, at least 99%, or at ease 99.5% identical to a naturally-occurring Cas12b/C2c1 or Cas12c/C2c3 protein. In some embodiments, the napDNAbp is a naturally-occurring Cas12b/C2c1 or Cas12c/C2c3 protein. In some embodiments, the napDNAbp comprises an amino acid sequence that is at least 85%, at least 90%, at least 91%, at least 92%, at least 93%, at least 94%, at least 95%, at least 96%, at least 97%, at least 98%, at least 99%, or at ease 99.5% identical to any one of the napDNAbp sequences provided herein. It should be appreciated that Cas12b/C2c1 or Cas12c/C2c3 from other bacterial species may also be used in accordance with the present disclosure.

[0333] In some embodiments, a napDNAbp refers to Cas12c. In some embodiments, the Cas12c protein is a Cas12c1 (SEQ ID NO: 239) or a variant of Cas12c1. In some embodiments, the Cas12 protein is a Cas12c2 (SEQ ID NO: 240) or a variant of Cas12c2. In some embodiments, the Cas12 protein is a Cas12c protein from Oleiphilus sp. HI0009 (i.e., OspCas12c; SEQ ID NO: 241) or a variant of OspCas12c. These Cas12c molecules have been described in Yan et al., “Functionally Diverse Type V CRISPR-Cas Systems,” Science, 2019 Jan. 4; 363: 88-91; the entire contents of which is hereby incorporated by reference. In some embodiments, the napDNAbp comprises an amino acid sequence that is at least 85%, at least 90%, at least 91%, at least 92%, at least 93%, at least 94%, at least 95%, at least 96%, at least 97%, at least 98%, at least 99%, or at least 99.5% identical to a naturally-occurring Cas12c1, Cas12c2, or OspCas12c protein. In some embodiments, the napDNAbp is a naturally-occurring Cas12c1, Cas12c2, or OspCas12c protein. In some embodiments, the napDNAbp comprises an amino acid sequence that is at least 85%, at least 90%, at least 91%, at least 92%, at least 93%, at least 94%, at least 95%, at least 96%, at least 97%, at least 98%, at least 99%, or at ease 99.5% identical to any Cas12c1, Cas12c2, or OspCas12c protein described herein. It should be appreciated that Cas12c1, Cas12c2, or OspCas12c from other bacterial species may also be used in accordance with the present disclosure.

[0334] In some embodiments, a napDNAbp refers to Cas12g, Cas12h, or Cas12i, which have been described in, for example, Yan et al., “Functionally Diverse Type V CRISPR-Cas Systems,” Science, 2019 Jan. 4; 363: 88-91; the entire contents of each is hereby incorporated by reference. Exemplary Cas12g, Cas12h, and Cas12i polypeptide sequences are provided in the Sequence Listing as SEQ ID NOs: 242-245. By aggregating more than 10 terabytes of sequence data, new classifications of Type V Cas proteins were identified that showed weak similarity to previously characterized Class V protein, including Cas12g, Cas12h, and Cas12i. In some embodiments, the Cas12 protein is a Cas12g or a variant of Cas12g. In some embodiments, the Cas12 protein is a Cas12h or a variant of Cas12h. In some embodiments, the Cas12 protein is a Cas12i or a variant of Cas12i. It should be appreciated that other RNA-guided DNA binding proteins may be used as a napDNAbp, and are within the scope of this disclosure. In some embodiments, the napDNAbp comprises an amino acid sequence that is at least 85%, at least 90%, at least 91%, at least 92%, at least 93%, at least 94%, at least 95%, at least 96%, at least 97%, at least 98%, at least 99%, or at least 99.5% identical to a naturally-occurring Cas12g, Cas12h, or Cas12i protein. In some embodiments, the napDNAbp is a naturally-occurring Cas12g, Cas12h, or Cas12i protein. In some embodiments, the napDNAbp comprises an amino acid sequence that is at least 85%, at least 90%, at least 91%, at least 92%, at least 93%, at least 94%, at least 95%, at least 96%, at least 97%, at least 98%, at least 99%, or at ease 99.5% identical to any Cas12g, Cas12h, or Cas12i protein described herein. It should be appreciated that Cas12g, Cas12h, or Cas12i from other bacterial species may also be used in accordance with the present disclosure. In some embodiments, the Cas12i is a Cas12i1 or a Cas12i2.

[0335] In some embodiments, the nucleic acid programmable DNA binding protein (napDNAbp) of any of the fusion proteins provided herein may be a Cas12j/CasΦ protein. Cas12j/CasΦ is described in Pausch et al., “CRISPR-CasΦ from huge phages is a hypercompact genome editor,” Science, 17 Jul. 2020, Vol. 369, Issue 6501, pp. 333-337, which is incorporated herein by reference in its entirety. In some embodiments, the napDNAbp comprises an amino acid sequence that is at least 85%, at least 90%, at least 91%, at least 92%, at least 93%, at least 94%, at least 95%, at least 96%, at least 97%, at least 98%, at least 99%, or at ease 99.5% identical to a naturally-occurring Cas12j/CasΦ protein. In some embodiments, the napDNAbp is a naturally-occurring Cas12j/CasΦ protein. In some embodiments, the napDNAbp is a nuclease inactive (“dead”) Cas12j/CasΦ protein. It should be appreciated that Cas12j/CasΦ from other species may also be used in accordance with the present disclosure.

Fusion Proteins with Internal Insertions

[0336] Provided herein are fusion proteins comprising a heterologous polypeptide fused to a nucleic acid programmable nucleic acid binding protein, for example, a napDNAbp. A heterologous polypeptide can be a polypeptide that is not found in the native or wild-type napDNAbp polypeptide sequence. The heterologous polypeptide can be fused to the napDNAbp at a C-terminal end of the napDNAbp, an N-terminal end of the napDNAbp, or inserted at an internal location of the napDNAbp. In some embodiments, the heterologous polypeptide is a deaminase (e.g., cytidine of adenosine deaminase) or a functional fragment thereof. For example, a fusion protein can comprise a deaminase flanked by an N-terminal fragment and a C-terminal fragment of a Cas9 or Cas12 (e.g., Cas12b/C2c1), polypeptide. In some embodiments, the cytidine deaminase is an APOBEC deaminase (e.g., APOBEC1). In some embodiments, the adenosine deaminase is a TadA (e.g., TadA*7.10 or TadA*8). In some embodiments, the TadA is a TadA*8 or a TadA*9. TadA sequences (e.g., TadA7.10 or TadA*8) as described herein are suitable deaminases for the above-described fusion proteins.

[0337] In some embodiments, the fusion protein comprises the structure:
[0338] NH2-[N-terminal fragment of a napDNAbp]-[deaminase]-[C-terminal fragment of a napDNAbp]-COOH;
[0339] NH2-[N-terminal fragment of a Cas9]-[adenosine deaminase]-[C-terminal fragment of a Cas9]-COOH;
[0340] NH2-[N-terminal fragment of a Cas12]-[adenosine deaminase]-[C-terminal fragment of a Cas12]-COOH;
[0341] NH2-[N-terminal fragment of a Cas9]-[cytidine deaminase]-[C-terminal fragment of a Cas9]-COOH;
[0342] NH2-[N-terminal fragment of a Cas12]-[cytidine deaminase]-[C-terminal fragment of a Cas12]-COOH;
[0343] wherein each instance of “]-[” is an optional linker.

[0344] The deaminase can be a circular permutant deaminase. For example, the deaminase can be a circular permutant adenosine deaminase. In some embodiments, the deaminase is a circular permutant TadA, circularly permutated at amino acid residue 116, 136, or 65 as numbered in the TadA reference sequence.

[0345] The fusion protein can comprise more than one deaminase. The fusion protein can comprise, for example, 1, 2, 3, 4, 5 or more deaminases. In some embodiments, the fusion protein comprises one or two deaminase. The two or more deaminases in a fusion protein can be an adenosine deaminase, a cytidine deaminase, or a combination thereof. The two or more deaminases can be homodimers or heterodimers. The two or more deaminases can be inserted in tandem in the napDNAbp. In some embodiments, the two or more deaminases may not be in tandem in the napDNAbp.

[0346] In some embodiments, the napDNAbp in the fusion protein is a Cas9 polypeptide or a fragment thereof. The Cas9 polypeptide can be a variant Cas9 polypeptide. In some embodiments, the Cas9 polypeptide is a Cas9 nickase (nCas9) polypeptide or a fragment thereof. In some embodiments, the Cas9 polypeptide is a nuclease dead Cas9 (dCas9) polypeptide or a fragment thereof. The Cas9 polypeptide in a fusion protein can be a full-length Cas9 polypeptide. In some cases, the Cas9 polypeptide in a fusion protein may not be a full length Cas9 polypeptide. The Cas9 polypeptide can be truncated, for example, at a N-terminal or C-terminal end relative to a naturally-occurring Cas9 protein. The Cas9 polypeptide can be a circularly permuted Cas9 protein. The Cas9 polypeptide can be a fragment, a portion, or a domain of a Cas9 polypeptide, that is still capable of binding the target polynucleotide and a guide nucleic acid sequence.

[0347] In some embodiments, the Cas9 polypeptide is a Streptococcus pyogenes Cas9 (SpCas9), Staphylococcus aureus Cas9 (SaCas9), Streptococcus thermophilus 1 Cas9 (St1Cas9), or fragments or variants of any of the Cas9 polypeptides described herein.

[0348] In some embodiments, the fusion protein comprises an adenosine deaminase domain and a cytidine deaminase domain inserted within a Cas9. In some embodiments, an adenosine deaminase is fused within a Cas9 and a cytidine deaminase is fused to the C-terminus. In some embodiments, an adenosine deaminase is fused within Cas9 and a cytidine deaminase fused to the N-terminus. In some embodiments, a cytidine deaminase is fused within Cas9 and an adenosine deaminase is fused to the C-terminus. In some embodiments, a cytidine deaminase is fused within Cas9 and an adenosine deaminase fused to the N-terminus.

[0349] Exemplary structures of a fusion protein with an adenosine deaminase and a cytidine deaminase and a Cas9 are provided as follows:
[0350] NH2-[Cas9(adenosine deaminase)]-[cytidine deaminase]-COOH;
[0351] NH2-[cytidine deaminase]-[Cas9(adenosine deaminase)]-COOH;
[0352] NH2-[Cas9(cytidine deaminase)]-[adenosine deaminase]-COOH; or
[0353] NH2-[adenosine deaminase]-[Cas9(cytidine deaminase)]-COOH.

[0354] In some embodiments, the “-” used in the general architecture above indicates the presence of an optional linker.

[0355] In various embodiments, the catalytic domain has DNA modifying activity (e.g., deaminase activity), such as adenosine deaminase activity. In some embodiments, the adenosine deaminase is a TadA (e.g., TadA*7.10). In some embodiments, the TadA is a TadA*8. In some embodiments, a TadA*8 is fused within Cas9 and a cytidine deaminase is fused to the C-terminus. In some embodiments, a TadA*8 is fused within Cas9 and a cytidine deaminase fused to the N-terminus. In some embodiments, a cytidine deaminase is fused within Cas9 and a TadA*8 is fused to the C-terminus. In some embodiments, a cytidine deaminase is fused within Cas9 and a TadA*8 fused to the N-terminus. Exemplary structures of a fusion protein with a TadA*8 and a cytidine deaminase and a Cas9 are provided as follows:
[0356] NH2-[Cas9(TadA*8)]-[cytidine deaminase]-COOH;
[0357] NH2-[cytidine deaminase]-[Cas9(TadA*8)]-COOH;
[0358] NH2-[Cas9(cytidine deaminase)]-[TadA*8]-COOH; or
[0359] NH2-[TadA*8]-[Cas9(cytidine deaminase)]-COOH.

[0360] In some embodiments, the “-” used in the general architecture above indicates the presence of an optional linker.

[0361] The heterologous polypeptide (e.g., deaminase) can be inserted in the napDNAbp (e.g., Cas9 or Cas12 (e.g., Cas12b/C2c1)) at a suitable location, for example, such that the napDNAbp retains its ability to bind the target polynucleotide and a guide nucleic acid. A deaminase (e.g., adenosine deaminase, cytidine deaminase, or adenosine deaminase and cytidine deaminase) can be inserted into a napDNAbp without compromising function of the deaminase (e.g., base editing activity) or the napDNAbp (e.g., ability to bind to target nucleic acid and guide nucleic acid). A deaminase (e.g., adenosine deaminase, cytidine deaminase, or adenosine deaminase and cytidine deaminase) can be inserted in the napDNAbp at, for example, a disordered region or a region comprising a high temperature factor or B-factor as shown by crystallographic studies. Regions of a protein that are less ordered, disordered, or unstructured, for example solvent exposed regions and loops, can be used for insertion without compromising structure or function. A deaminase (e.g., adenosine deaminase, cytidine deaminase, or adenosine deaminase and cytidine deaminase) can be inserted in the napDNAbp in a flexible loop region or a solvent-exposed region. In some embodiments, the deaminase (e.g., adenosine deaminase, cytidine deaminase, or adenosine deaminase and cytidine deaminase) is inserted in a flexible loop of the Cas9 or the Cas12b/C2c1 polypeptide.

[0362] In some embodiments, the insertion location of a deaminase (e.g., adenosine deaminase, cytidine deaminase, or adenosine deaminase and cytidine deaminase) is determined by B-factor analysis of the crystal structure of Cas9 polypeptide. In some embodiments, the deaminase (e.g., adenosine deaminase, cytidine deaminase, or adenosine deaminase and cytidine deaminase) is inserted in regions of the Cas9 polypeptide comprising higher than average B-factors (e.g., higher B factors compared to the total protein or the protein domain comprising the disordered region). B-factor or temperature factor can indicate the fluctuation of atoms from their average position (for example, as a result of temperature-dependent atomic vibrations or static disorder in a crystal lattice). A high B-factor (e.g., higher than average B-factor) for backbone atoms can be indicative of a region with relatively high local mobility. Such a region can be used for inserting a deaminase without compromising structure or function. A deaminase (e.g., adenosine deaminase, cytidine deaminase, or adenosine deaminase and cytidine deaminase) can be inserted at a location with a residue having a Ca atom with a B-factor that is 50%, 60%, 70%, 80%, 90%, 100%, 110%, 120%, 130%, 140%, 150%, 160%, 170%, 180%, 190%, 200%, or greater than 200% more than the average B-factor for the total protein. A deaminase (e.g., adenosine deaminase, cytidine deaminase, or adenosine deaminase and cytidine deaminase) can be inserted at a location with a residue having a Ca atom with a B-factor that is 50%, 60%, 70%, 80%, 90%, 100%, 110%, 120%, 130%, 140%, 150%, 160%, 170%, 180%, 190%,200% or greater than 200% more than the average B-factor for a Cas9 protein domain comprising the residue. Cas9 polypeptide positions comprising a higher than average B-factor can include, for example, residues 768, 792, 1052, 1015, 1022, 1026, 1029, 1067, 1040, 1054, 1068, 1246, 1247, and 1248 as numbered in the above Cas9 reference sequence. Cas9 polypeptide regions comprising a higher than average B-factor can include, for example, residues 792-872, 792-906, and 2-791 as numbered in the above Cas9 reference sequence.

[0363] A heterologous polypeptide (e.g., deaminase) can be inserted in the napDNAbp at an amino acid residue selected from the group consisting of: 768, 791, 792, 1015, 1016, 1022, 1023, 1026, 1029, 1040, 1052, 1054, 1067, 1068, 1069, 1246, 1247, and 1248 as numbered in the above Cas9 reference sequence, or a corresponding amino acid residue in another Cas9 polypeptide. In some embodiments, the heterologous polypeptide is inserted between amino acid positions 768-769, 791-792, 792-793, 1015-1016, 1022-1023, 1026-1027, 1029-1030, 1040-1041, 1052-1053, 1054-1055, 1067-1068, 1068-1069, 1247-1248, or 1248-1249 as numbered in the above Cas9 reference sequence or corresponding amino acid positions thereof. In some embodiments, the heterologous polypeptide is inserted between amino acid positions 769-770, 792-793, 793-794, 1016-1017, 1023-1024, 1027-1028, 1030-1031, 1041-1042, 1053-1054, 1055-1056, 1068-1069, 1069-1070, 1248-1249, or 1249-1250 as numbered in the above Cas9 reference sequence or corresponding amino acid positions thereof. In some embodiments, the heterologous polypeptide replaces an amino acid residue selected from the group consisting of: 768, 791, 792, 1015, 1016, 1022, 1023, 1026, 1029, 1040, 1052, 1054, 1067, 1068, 1069, 1246, 1247, and 1248 as numbered in the above Cas9 reference sequence, or a corresponding amino acid residue in another Cas9 polypeptide. It should be understood that the reference to the above Cas9 reference sequence with respect to insertion positions is for illustrative purposes. The insertions as discussed herein are not limited to the Cas9 polypeptide sequence of the above Cas9 reference sequence, but include insertion at corresponding locations in variant Cas9 polypeptides, for example a Cas9 nickase (nCas9), nuclease dead Cas9 (dCas9), a Cas9 variant lacking a nuclease domain, a truncated Cas9, or a Cas9 domain lacking partial or complete HNH domain.

[0364] A heterologous polypeptide (e.g., deaminase) can be inserted in the napDNAbp at an amino acid residue selected from the group consisting of: 768, 792, 1022, 1026, 1040, 1068, and 1247 as numbered in the above Cas9 reference sequence, or a corresponding amino acid residue in another Cas9 polypeptide. In some embodiments, the heterologous polypeptide is inserted between amino acid positions 768-769, 792-793, 1022-1023, 1026-1027, 1029-1030, 1040-1041, 1068-1069, or 1247-1248 as numbered in the above Cas9 reference sequence or corresponding amino acid positions thereof. In some embodiments, the heterologous polypeptide is inserted between amino acid positions 769-770, 793-794, 1023-1024, 1027-1028, 1030-1031, 1041-1042, 1069-1070, or 1248-1249 as numbered in the above Cas9 reference sequence or corresponding amino acid positions thereof. In some embodiments, the heterologous polypeptide replaces an amino acid residue selected from the group consisting of: 768, 792, 1022, 1026, 1040, 1068, and 1247 as numbered in the above Cas9 reference sequence, or a corresponding amino acid residue in another Cas9 polypeptide.

[0365] A heterologous polypeptide (e.g., deaminase) can be inserted in the napDNAbp at an amino acid residue as described herein, or a corresponding amino acid residue in another Cas9 polypeptide. In an embodiment, a heterologous polypeptide (e.g., deaminase) can be inserted in the napDNAbp at an amino acid residue selected from the group consisting of: 1002, 1003, 1025, 1052-1056, 1242-1247, 1061-1077, 943-947, 686-691, 569-578, 530-539, and 1060-1077 as numbered in the above Cas9 reference sequence, or a corresponding amino acid residue in another Cas9 polypeptide. The deaminase (e.g., adenosine deaminase, cytidine deaminase, or adenosine deaminase and cytidine deaminase) can be inserted at the N-terminus or the C-terminus of the residue or replace the residue. In some embodiments, the deaminase (e.g., adenosine deaminase, cytidine deaminase, or adenosine deaminase and cytidine deaminase) is inserted at the C-terminus of the residue.

[0366] In some embodiments, an adenosine deaminase (e.g., TadA) is inserted at an amino acid residue selected from the group consisting of: 1015, 1022, 1029, 1040, 1068, 1247, 1054, 1026, 768, 1067, 1248, 1052, and 1246 as numbered in the above Cas9 reference sequence, or a corresponding amino acid residue in another Cas9 polypeptide. In some embodiments, an adenosine deaminase (e.g., TadA) is inserted in place of residues 792-872, 792-906, or 2-791 as numbered in the above Cas9 reference sequence, or a corresponding amino acid residue in another Cas9 polypeptide. In some embodiments, the adenosine deaminase is inserted at the N-terminus of an amino acid selected from the group consisting of: 1015, 1022, 1029, 1040, 1068, 1247, 1054, 1026, 768, 1067, 1248, 1052, and 1246 as numbered in the above Cas9 reference sequence, or a corresponding amino acid residue in another Cas9 polypeptide. In some embodiments, the adenosine deaminase is inserted at the C-terminus of an amino acid selected from the group consisting of: 1015, 1022, 1029, 1040, 1068, 1247, 1054, 1026, 768, 1067, 1248, 1052, and 1246 as numbered in the above Cas9 reference sequence, or a corresponding amino acid residue in another Cas9 polypeptide. In some embodiments, the adenosine deaminase is inserted to replace an amino acid selected from the group consisting of: 1015, 1022, 1029, 1040, 1068, 1247, 1054, 1026, 768, 1067, 1248, 1052, and 1246 as numbered in the above Cas9 reference sequence, or a corresponding amino acid residue in another Cas9 polypeptide.

[0367] In some embodiments, a cytidine deaminase (e.g., APOBECI) is inserted at an amino acid residue selected from the group consisting of: 1016, 1023, 1029, 1040, 1069, and 1247 as numbered in the above Cas9 reference sequence, or a corresponding amino acid residue in another Cas9 polypeptide. In some embodiments, the cytidine deaminase is inserted at the N-terminus of an amino acid selected from the group consisting of: 1016, 1023, 1029, 1040, 1069, and 1247 as numbered in the above Cas9 reference sequence, or a corresponding amino acid residue in another Cas9 polypeptide. In some embodiments, the cytidine deaminase is inserted at the C-terminus of an amino acid selected from the group consisting of: 1016, 1023, 1029, 1040, 1069, and 1247 as numbered in the above Cas9 reference sequence, or a corresponding amino acid residue in another Cas9 polypeptide. In some embodiments, the cytidine deaminase is inserted to replace an amino acid selected from the group consisting of: 1016, 1023, 1029, 1040, 1069, and 1247 as numbered in the above Cas9 reference sequence, or a corresponding amino acid residue in another Cas9 polypeptide.

[0368] In some embodiments, the deaminase (e.g., adenosine deaminase, cytidine deaminase, or adenosine deaminase and cytidine deaminase) is inserted at amino acid residue 768 as numbered in the above Cas9 reference sequence, or a corresponding amino acid residue in another Cas9 polypeptide. In some embodiments, the deaminase (e.g., adenosine deaminase, cytidine deaminase, or adenosine deaminase and cytidine deaminase) is inserted at the N-terminus of amino acid residue 768 as numbered in the above Cas9 reference sequence, or a corresponding amino acid residue in another Cas9 polypeptide. In some embodiments, the deaminase (e.g., adenosine deaminase, cytidine deaminase, or adenosine deaminase and cytidine deaminase) is inserted at the C-terminus of amino acid residue 768 as numbered in the above Cas9 reference sequence, or a corresponding amino acid residue in another Cas9 polypeptide. In some embodiments, the deaminase (e.g., adenosine deaminase, cytidine deaminase, or adenosine deaminase and cytidine deaminase) is inserted to replace amino acid residue 768 as numbered in the above Cas9 reference sequence, or a corresponding amino acid residue in another Cas9 polypeptide.

[0369] In some embodiments, the deaminase (e.g., adenosine deaminase, cytidine deaminase, or adenosine deaminase and cytidine deaminase) is inserted at amino acid residue 791 or is inserted at amino acid residue 792, as numbered in the above Cas9 reference sequence, or a corresponding amino acid residue in another Cas9 polypeptide. In some embodiments, the deaminase (e.g., adenosine deaminase, cytidine deaminase, or adenosine deaminase and cytidine deaminase) is inserted at the N-terminus of amino acid residue 791 or is inserted at the N-terminus of amino acid 792, as numbered in the above Cas9 reference sequence, or a corresponding amino acid residue in another Cas9 polypeptide. In some embodiments, the deaminase (e.g., adenosine deaminase, cytidine deaminase, or adenosine deaminase and cytidine deaminase) is inserted at the C-terminus of amino acid 791 or is inserted at the N-terminus of amino acid 792, as numbered in the above Cas9 reference sequence, or a corresponding amino acid residue in another Cas9 polypeptide. In some embodiments, the deaminase (e.g., adenosine deaminase, cytidine deaminase, or adenosine deaminase and cytidine deaminase) is inserted to replace amino acid 791, or is inserted to replace amino acid 792, as numbered in the above Cas9 reference sequence, or a corresponding amino acid residue in another Cas9 polypeptide.

[0370] In some embodiments, the deaminase (e.g., adenosine deaminase, cytidine deaminase, or adenosine deaminase and cytidine deaminase) is inserted at amino acid residue 1016 as numbered in the above Cas9 reference sequence, or a corresponding amino acid residue in another Cas9 polypeptide. In some embodiments, the deaminase (e.g., adenosine deaminase, cytidine deaminase, or adenosine deaminase and cytidine deaminase) is inserted at the N-terminus of amino acid residue 1016 as numbered in the above Cas9 reference sequence, or a corresponding amino acid residue in another Cas9 polypeptide. In some embodiments, the deaminase (e.g., adenosine deaminase, cytidine deaminase, or adenosine deaminase and cytidine deaminase) is inserted at the C-terminus of amino acid residue 1016 as numbered in the above Cas9 reference sequence, or a corresponding amino acid residue in another Cas9 polypeptide. In some embodiments, the deaminase (e.g., adenosine deaminase, cytidine deaminase, or adenosine deaminase and cytidine deaminase) is inserted to replace amino acid residue 1016 as numbered in the above Cas9 reference sequence, or a corresponding amino acid residue in another Cas9 polypeptide.

[0371] In some embodiments, the deaminase (e.g., adenosine deaminase, cytidine deaminase, or adenosine deaminase and cytidine deaminase) is inserted at amino acid residue 1022, or is inserted at amino acid residue 1023, as numbered in the above Cas9 reference sequence, or a corresponding amino acid residue in another Cas9 polypeptide. In some embodiments, the deaminase (e.g., adenosine deaminase, cytidine deaminase, or adenosine deaminase and cytidine deaminase) is inserted at the N-terminus of amino acid residue 1022 or is inserted at the N-terminus of amino acid residue 1023, as numbered in the above Cas9 reference sequence, or a corresponding amino acid residue in another Cas9 polypeptide. In some embodiments, the deaminase (e.g., adenosine deaminase, cytidine deaminase, or adenosine deaminase and cytidine deaminase) is inserted at the C-terminus of amino acid residue 1022 or is inserted at the C-terminus of amino acid residue 1023, as numbered in the above Cas9 reference sequence, or a corresponding amino acid residue in another Cas9 polypeptide. In some embodiments, the deaminase (e.g., adenosine deaminase, cytidine deaminase, or adenosine deaminase and cytidine deaminase) is inserted to replace amino acid residue 1022, or is inserted to replace amino acid residue 1023, as numbered in the above Cas9 reference sequence, or a corresponding amino acid residue in another Cas9 polypeptide.

[0372] In some embodiments, the deaminase (e.g., adenosine deaminase, cytidine deaminase, or adenosine deaminase and cytidine deaminase) is inserted at amino acid residue 1026, or is inserted at amino acid residue 1029, as numbered in the above Cas9 reference sequence, or a corresponding amino acid residue in another Cas9 polypeptide. In some embodiments, the deaminase (e.g., adenosine deaminase, cytidine deaminase, or adenosine deaminase and cytidine deaminase) is inserted at the N-terminus of amino acid residue 1026 or is inserted at the N-terminus of amino acid residue 1029, as numbered in the above Cas9 reference sequence, or a corresponding amino acid residue in another Cas9 polypeptide. In some embodiments, the deaminase (e.g., adenosine deaminase, cytidine deaminase, or adenosine deaminase and cytidine deaminase) is inserted at the C-terminus of amino acid residue 1026 or is inserted at the C-terminus of amino acid residue 1029, as numbered in the above Cas9 reference sequence, or a corresponding amino acid residue in another Cas9 polypeptide. In some embodiments, the deaminase (e.g., adenosine deaminase, cytidine deaminase, or adenosine deaminase and cytidine deaminase) is inserted to replace amino acid residue 1026, or is inserted to replace amino acid residue 1029, as numbered in the above Cas9 reference sequence, or corresponding amino acid residue in another Cas9 polypeptide.

[0373] In some embodiments, the deaminase (e.g., adenosine deaminase, cytidine deaminase, or adenosine deaminase and cytidine deaminase) is inserted at amino acid residue 1040 as numbered in the above Cas9 reference sequence, or a corresponding amino acid residue in another Cas9 polypeptide. In some embodiments, the deaminase (e.g., adenosine deaminase, cytidine deaminase, or adenosine deaminase and cytidine deaminase) is inserted at the N-terminus of amino acid residue 1040 as numbered in the above Cas9 reference sequence, or a corresponding amino acid residue in another Cas9 polypeptide. In some embodiments, the deaminase (e.g., adenosine deaminase, cytidine deaminase, or adenosine deaminase and cytidine deaminase) is inserted at the C-terminus of amino acid residue 1040 as numbered in the above Cas9 reference sequence, or a corresponding amino acid residue in another Cas9 polypeptide. In some embodiments, the deaminase (e.g., adenosine deaminase, cytidine deaminase, or adenosine deaminase and cytidine deaminase) is inserted to replace amino acid residue 1040 as numbered in the above Cas9 reference sequence, or a corresponding amino acid residue in another Cas9 polypeptide.

[0374] In some embodiments, the deaminase (e.g., adenosine deaminase, cytidine deaminase, or adenosine deaminase and cytidine deaminase) is inserted at amino acid residue 1052, or is inserted at amino acid residue 1054, as numbered in the above Cas9 reference sequence, or a corresponding amino acid residue in another Cas9 polypeptide. In some embodiments, the deaminase (e.g., adenosine deaminase, cytidine deaminase, or adenosine deaminase and cytidine deaminase) is inserted at the N-terminus of amino acid residue 1052 or is inserted at the N-terminus of amino acid residue 1054, as numbered in the above Cas9 reference sequence, or a corresponding amino acid residue in another Cas9 polypeptide. In some embodiments, the deaminase (e.g., adenosine deaminase, cytidine deaminase, or adenosine deaminase and cytidine deaminase) is inserted at the C-terminus of amino acid residue 1052 or is inserted at the C-terminus of amino acid residue 1054, as numbered in the above Cas9 reference sequence, or a corresponding amino acid residue in another Cas9 polypeptide. In some embodiments, the deaminase (e.g., adenosine deaminase, cytidine deaminase, or adenosine deaminase and cytidine deaminase) is inserted to replace amino acid residue 1052, or is inserted to replace amino acid residue 1054, as numbered in the above Cas9 reference sequence, or a corresponding amino acid residue in another Cas9 polypeptide.

[0375] In some embodiments, the deaminase (e.g., adenosine deaminase, cytidine deaminase, or adenosine deaminase and cytidine deaminase) is inserted at amino acid residue 1067, or is inserted at amino acid residue 1068, or is inserted at amino acid residue 1069, as numbered in the above Cas9 reference sequence, or a corresponding amino acid residue in another Cas9 polypeptide. In some embodiments, the deaminase (e.g., adenosine deaminase, cytidine deaminase, or adenosine deaminase and cytidine deaminase) is inserted at the N-terminus of amino acid residue 1067 or is inserted at the N-terminus of amino acid residue 1068 or is inserted at the N-terminus of amino acid residue 1069, as numbered in the above Cas9 reference sequence, or a corresponding amino acid residue in another Cas9 polypeptide. In some embodiments, the deaminase (e.g., adenosine deaminase, cytidine deaminase, or adenosine deaminase and cytidine deaminase) is inserted at the C-terminus of amino acid residue 1067 or is inserted at the C-terminus of amino acid residue 1068 or is inserted at the C-terminus of amino acid residue 1069, as numbered in the above Cas9 reference sequence, or a corresponding amino acid residue in another Cas9 polypeptide. In some embodiments, the deaminase (e.g., adenosine deaminase, cytidine deaminase, or adenosine deaminase and cytidine deaminase) is inserted to replace amino acid residue 1067, or is inserted to replace amino acid residue 1068, or is inserted to replace amino acid residue 1069, as numbered in the above Cas9 reference sequence, or a corresponding amino acid residue in another Cas9 polypeptide.

[0376] In some embodiments, the deaminase (e.g., adenosine deaminase, cytidine deaminase, or adenosine deaminase and cytidine deaminase) is inserted at amino acid residue 1246, or is inserted at amino acid residue 1247, or is inserted at amino acid residue 1248, as numbered in the above Cas9 reference sequence, or a corresponding amino acid residue in another Cas9 polypeptide. In some embodiments, the deaminase (e.g., adenosine deaminase, cytidine deaminase, or adenosine deaminase and cytidine deaminase) is inserted at the N-terminus of amino acid residue 1246 or is inserted at the N-terminus of amino acid residue 1247 or is inserted at the N-terminus of amino acid residue 1248, as numbered in the above Cas9 reference sequence, or a corresponding amino acid residue in another Cas9 polypeptide. In some embodiments, the deaminase (e.g., adenosine deaminase, cytidine deaminase, or adenosine deaminase and cytidine deaminase) is inserted at the C-terminus of amino acid residue 1246 or is inserted at the C-terminus of amino acid residue 1247 or is inserted at the C-terminus of amino acid residue 1248, as numbered in the above Cas9 reference sequence, or a corresponding amino acid residue in another Cas9 polypeptide. In some embodiments, the deaminase (e.g., adenosine deaminase, cytidine deaminase, or adenosine deaminase and cytidine deaminase) is inserted to replace amino acid residue 1246, or is inserted to replace amino acid residue 1247, or is inserted to replace amino acid residue 1248, as numbered in the above Cas9 reference sequence, or a corresponding amino acid residue in another Cas9 polypeptide.

[0377] In some embodiments, a heterologous polypeptide (e.g., deaminase) is inserted in a flexible loop of a Cas9 polypeptide. The flexible loop portions can be selected from the group consisting of 530-537, 569-570, 686-691, 943-947, 1002-1025, 1052-1077, 1232-1247, or 1298-1300 as numbered in the above Cas9 reference sequence, or a corresponding amino acid residue in another Cas9 polypeptide. The flexible loop portions can be selected from the group consisting of: 1-529, 538-568, 580-685, 692-942, 948-1001, 1026-1051, 1078-1231, or 1248-1297 as numbered in the above Cas9 reference sequence, or a corresponding amino acid residue in another Cas9 polypeptide.

[0378] A heterologous polypeptide (e.g., adenine deaminase) can be inserted into a Cas9 polypeptide region corresponding to amino acid residues: 1017-1069, 1242-1247, 1052-1056, 1060-1077, 1002-1003, 943-947, 530-537, 568-579, 686-691, 1242-1247, 1298-1300, 1066-1077, 1052-1056, or 1060-1077 as numbered in the above Cas9 reference sequence, or a corresponding amino acid residue in another Cas9 polypeptide.

[0379] A heterologous polypeptide (e.g., adenine deaminase) can be inserted in place of a deleted region of a Cas9 polypeptide. The deleted region can correspond to an N-terminal or C-terminal portion of the Cas9 polypeptide. In some embodiments, the deleted region corresponds to residues 792-872 as numbered in the above Cas9 reference sequence, or a corresponding amino acid residue in another Cas9 polypeptide. In some embodiments, the deleted region corresponds to residues 792-906 as numbered in the above Cas9 reference sequence, or a corresponding amino acid residue in another Cas9 polypeptide. In some embodiments, the deleted region corresponds to residues 2-791 as numbered in the above Cas9 reference sequence, or a corresponding amino acid residue in another Cas9 polypeptide. In some embodiments, the deleted region corresponds to residues 1017-1069 as numbered in the above Cas9 reference sequence, or corresponding amino acid residues thereof.

[0380] Exemplary internal fusions base editors are provided in Table 4 below:

TABLE 4
Insertion loci in Cas9 proteins

| BE ID | Modification | Other ID |
|---|---|---|
| IBE001 | Cas9 TadA ins 1015 | ISLAY01 |
| IBE002 | Cas9 TadA ins 1022 | ISLAY02 |
| IBE003 | Cas9 TadA ins 1029 | ISLAY03 |
| IBE004 | Cas9 TadA ins 1040 | ISLAY04 |
| IBE005 | Cas9 TadA ins 1068 | ISLAY05 |
| IBE006 | Cas9 TadA ins 1247 | ISLAY06 |
| IBE007 | Cas9 TadA ins 1054 | ISLAY07 |
| IBE008 | Cas9 TadA ins 1026 | ISLAY08 |
| IBE009 | Cas9 TadA ins 768 | ISLAY09 |
| IBE020 | delta HNH TadA 792 | ISLAY20 |
| IBE021 | N-term fusion single TadA helix truncated 165-end | ISLAY21 |
| IBE029 | TadA-Circular Permutant116 ins1067 | ISLAY29 |
| IBE031 | TadA- Circular Permutant 136 ins1248 | ISLAY31 |
| IBE032 | TadA- Circular Permutant 136ins 1052 | ISLAY32 |
| IBE035 | delta 792-872 TadA ins | ISLAY35 |
| IBE036 | delta 792-906 TadA ins | ISLAY36 |
| IBE043 | TadA-Circular Permutant 65 ins1246 | ISLAY43 |
| IBE044 | TadA ins C-term truncate2 791 | ISLAY44 |

[0381] A heterologous polypeptide (e.g., deaminase) can be inserted within a structural or functional domain of a Cas9 polypeptide. A heterologous polypeptide (e.g., deaminase) can be inserted between two structural or functional domains of a Cas9 polypeptide. A heterologous polypeptide (e.g., deaminase) can be inserted in place of a structural or functional domain of a Cas9 polypeptide, for example, after deleting the domain from the Cas9 polypeptide. The structural or functional domains of a Cas9 polypeptide can include, for example, RuvC I, RuvC II, RuvC III, Rec1, Rec2, PI, or HNH.

[0382] In some embodiments, the Cas9 polypeptide lacks one or more domains selected from the group consisting of: RuvC I, RuvC II, RuvC III, Recd, Rec2, PI, or HNH domain. In some embodiments, the Cas9 polypeptide lacks a nuclease domain. In some embodiments, the Cas9 polypeptide lacks an HNH domain. In some embodiments, the Cas9 polypeptide lacks a portion of the HNH domain such that the Cas9 polypeptide has reduced or abolished HNH activity. In some embodiments, the Cas9 polypeptide comprises a deletion of the nuclease domain, and the deaminase is inserted to replace the nuclease domain. In some embodiments, the HNH domain is deleted and the deaminase is inserted in its place. In some embodiments, one or more of the RuvC domains is deleted and the deaminase is inserted in its place.

[0383] A fusion protein comprising a heterologous polypeptide can be flanked by a N-terminal and a C-terminal fragment of a napDNAbp. In some embodiments, the fusion protein comprises a deaminase flanked by a N-terminal fragment and a C-terminal fragment of a Cas9 polypeptide. The N terminal fragment or the C terminal fragment can bind the target polynucleotide sequence. The C-terminus of the N terminal fragment or the N-terminus of the C terminal fragment can comprise a part of a flexible loop of a Cas9 polypeptide. The C-terminus of the N terminal fragment or the N-terminus of the C terminal fragment can comprise a part of an alpha-helix structure of the Cas9 polypeptide. The N-terminal fragment or the C-terminal fragment can comprise a DNA binding domain. The N-terminal fragment or the C-terminal fragment can comprise a RuvC domain. The N-terminal fragment or the C-terminal fragment can comprise an HNH domain. In some embodiments, neither of the N-terminal fragment and the C-terminal fragment comprises an HNH domain.

[0384] In some embodiments, the C-terminus of the N terminal Cas9 fragment comprises an amino acid that is in proximity to a target nucleobase when the fusion protein deaminates the target nucleobase. In some embodiments, the N-terminus of the C terminal Cas9 fragment comprises an amino acid that is in proximity to a target nucleobase when the fusion protein deaminates the target nucleobase. The insertion location of different deaminases can be different in order to have proximity between the target nucleobase and an amino acid in the C-terminus of the N terminal Cas9 fragment or the N-terminus of the C terminal Cas9 fragment. For example, the insertion position of an deaminase can be at an amino acid residue selected from the group consisting of: 1015, 1022, 1029, 1040, 1068, 1247, 1054, 1026, 768, 1067, 1248, 1052, and 1246 as numbered in the above Cas9 reference sequence, or a corresponding amino acid residue in another Cas9 polypeptide.

[0385] The N-terminal Cas9 fragment of a fusion protein (i.e. the N-terminal Cas9 fragment flanking the deaminase in a fusion protein) can comprise the N-terminus of a Cas9 polypeptide. The N-terminal Cas9 fragment of a fusion protein can comprise a length of at least about: 100, 200, 300, 400, 500, 600, 700, 800, 900, 1000, 1100, 1200, or 1300 amino acids. The N-terminal Cas9 fragment of a fusion protein can comprise a sequence corresponding to amino acid residues: 1-56, 1-95, 1-200, 1-300, 1-400, 1-500, 1-600, 1-700, 1-718, 1-765, 1-780, 1-906, 1-918, or 1-1100 as numbered in the above Cas9 reference sequence, or a corresponding amino acid residue in another Cas9 polypeptide. The N-terminal Cas9 fragment can comprise a sequence comprising at least: 85%, at least 90%, at least 91%, at least 92%, at least 93%, at least 94%, at least 95%, at least 96%, at least 97%, at least 98%, at least 99%, or at least 99.5% sequence identity to amino acid residues: 1-56, 1-95, 1-200, 1-300, 1-400, 1-500, 1-600, 1-700, 1-718, 1-765, 1-780, 1-906, 1-918, or 1-1100 as numbered in the above Cas9 reference sequence, or a corresponding amino acid residue in another Cas9 polypeptide.

[0386] The C-terminal Cas9 fragment of a fusion protein (i.e. the C-terminal Cas9 fragment flanking the deaminase in a fusion protein) can comprise the C-terminus of a Cas9 polypeptide. The C-terminal Cas9 fragment of a fusion protein can comprise a length of at least about: 100, 200, 300, 400, 500, 600, 700, 800, 900, 1000, 1100, 1200, or 1300 amino acids. The C-terminal Cas9 fragment of a fusion protein can comprise a sequence corresponding to amino acid residues: 1099-1368, 918-1368, 906-1368, 780-1368, 765-1368, 718-1368, 94-1368, or 56-1368 as numbered in the above Cas9 reference sequence, or a corresponding amino acid residue in another Cas9 polypeptide. The N-terminal Cas9 fragment can comprise a sequence comprising at least: 85%, at least 90%, at least 91%, at least 92%, at least 93%, at least 94%, at least 95%, at least 96%, at least 97%, at least 98%, at least 99%, or at least 99.5% sequence identity to amino acid residues: 1099-1368, 918-1368, 906-1368, 780-1368, 765-1368, 718-1368, 94-1368, or 56-1368 as numbered in the above Cas9 reference sequence, or a corresponding amino acid residue in another Cas9 polypeptide.

[0387] The N-terminal Cas9 fragment and C-terminal Cas9 fragment of a fusion protein taken together may not correspond to a full-length naturally occurring Cas9 polypeptide sequence, for example, as set forth in the above Cas9 reference sequence.

[0388] The fusion protein described herein can effect targeted deamination with reduced deamination at non-target sites (e.g., off-target sites), such as reduced genome wide spurious deamination. The fusion protein described herein can effect targeted deamination with reduced bystander deamination at non-target sites. The undesired deamination or off-target deamination can be reduced by at least 30%, at least 40%, at least 50%, at least 60%, at least 70%, at least 80%, at least 90%, at least 95%, or at least 99% compared with, for example, an end terminus fusion protein comprising the deaminase fused to a N terminus or a C terminus of a Cas9 polypeptide. The undesired deamination or off-target deamination can be reduced by at least one-fold, at least two-fold, at least three-fold, at least four-fold, at least five-fold, at least tenfold, at least fifteen fold, at least twenty fold, at least thirty fold, at least forty fold, at least fifty fold, at least 60 fold, at least 70 fold, at least 80 fold, at least 90 fold, or at least hundred fold, compared with, for example, an end terminus fusion protein comprising the deaminase fused to a N terminus or a C terminus of a Cas9 polypeptide.

[0389] In some embodiments, the deaminase (e.g., adenosine deaminase, cytidine deaminase, or adenosine deaminase and cytidine deaminase) of the fusion protein deaminates no more than two nucleobases within the range of an R-loop. In some embodiments, the deaminase of the fusion protein deaminates no more than three nucleobases within the range of the R-loop. In some embodiments, the deaminase of the fusion protein deaminates no more than 2, 3, 4, 5, 6, 7, 8, 9, or 10 nucleobases within the range of the R-loop. An R-loop is a three-stranded nucleic acid structure including a DNA:RNA hybrid, a DNA:DNA or an RNA: RNA complementary structure and the associated with single-stranded DNA. As used herein, an R-loop may be formed when a target polynucleotide is contacted with a CRISPR complex or a base editing complex, wherein a portion of a guide polynucleotide, e.g. a guide RNA, hybridizes with and displaces with a portion of a target polynucleotide, e.g. a target DNA. In some embodiments, an R-loop comprises a hybridized region of a spacer sequence and a target DNA complementary sequence. An R-loop region may be of about 5, 6, 7, 8, 9, 10, 11, 12, 13, 14, 15, 16, 17, 18, 19, 20, 21, 22, 23, 24, 25, 26, 27, 28, 29, 30, 31, 32, 33, 34, 35, 36, 37, 38, 39, 40, 41, 42, 43, 44, 45, 46, 47, 48, 49, or 50 nucleobase pairs in length. In some embodiments, the R-loop region is about 20 nucleobase pairs in length. It should be understood that, as used herein, an R-loop region is not limited to the target DNA strand that hybridizes with the guide polynucleotide. For example, editing of a target nucleobase within an R-loop region may be to a DNA strand that comprises the complementary strand to a guide RNA, or may be to a DNA strand that is the opposing strand of the strand complementary to the guide RNA. In some embodiments, editing in the region of the R-loop comprises editing a nucleobase on non-complementary strand (protospacer strand) to a guide RNA in a target DNA sequence.

[0390] The fusion protein described herein can effect target deamination in an editing window different from canonical base editing. In some embodiments, a target nucleobase is from about 1 to about 20 bases upstream of a PAM sequence in the target polynucleotide sequence. In some embodiments, a target nucleobase is from about 2 to about 12 bases upstream of a PAM sequence in the target polynucleotide sequence. In some embodiments, a target nucleobase is from about 1 to 9 base pairs, about 2 to 10 base pairs, about 3 to 11 base pairs, about 4 to 12 base pairs, about 5 to 13 base pairs, about 6 to 14 base pairs, about 7 to 15 base pairs, about 8 to 16 base pairs, about 9 to 17 base pairs, about 10 to 18 base pairs, about 11 to 19 base pairs, about 12 to 20 base pairs, about 1 to 7 base pairs, about 2 to 8 base pairs, about 3 to 9 base pairs, about 4 to 10 base pairs, about 5 to 11 base pairs, about 6 to 12 base pairs, about 7 to 13 base pairs, about 8 to 14 base pairs, about 9 to 15 base pairs, about 10 to 16 base pairs, about 11 to 17 base pairs, about 12 to 18 base pairs, about 13 to 19 base pairs, about 14 to 20 base pairs, about 1 to 5 base pairs, about 2 to 6 base pairs, about 3 to 7 base pairs, about 4 to 8 base pairs, about 5 to 9 base pairs, about 6 to 10 base pairs, about 7 to 11 base pairs, about 8 to 12 base pairs, about 9 to 13 base pairs, about 10 to 14 base pairs, about 11 to 15 base pairs, about 12 to 16 base pairs, about 13 to 17 base pairs, about 14 to 18 base pairs, about 15 to 19 base pairs, about 16 to 20 base pairs, about 1 to 3 base pairs, about 2 to 4 base pairs, about 3 to 5 base pairs, about 4 to 6 base pairs, about 5 to 7 base pairs, about 6 to 8 base pairs, about 7 to 9 base pairs, about 8 to 10 base pairs, about 9 to 11 base pairs, about 10 to 12 base pairs, about 11 to 13 base pairs, about 12 to 14 base pairs, about 13 to 15 base pairs, about 14 to 16 base pairs, about 15 to 17 base pairs, about 16 to 18 base pairs, about 17 to 19 base pairs, about 18 to 20 base pairs away or upstream of the PAM sequence. In some embodiments, a target nucleobase is about 1, 2, 3, 4, 5, 6, 7, 8, 9, 10, 11, 12, 13, 14, 15, 16, 17, 18, 19, 20, or more base pairs away from or upstream of the PAM sequence. In some embodiments, a target nucleobase is about 1, 2, 3, 4, 5, 6, 7, 8, or 9 base pairs upstream of the PAM sequence. In some embodiments, a target nucleobase is about 2, 3, 4, or 6 base pairs upstream of the PAM sequence.

[0391] The fusion protein can comprise more than one heterologous polypeptide. For example, the fusion protein can additionally comprise one or more UGI domains and/or one or more nuclear localization signals. The two or more heterologous domains can be inserted in tandem. The two or more heterologous domains can be inserted at locations such that they are not in tandem in the NapDNAbp.

[0392] A fusion protein can comprise a linker between the deaminase and the napDNAbp polypeptide. The linker can be a peptide or a non-peptide linker. For example, the linker can be an XTEN, (GGGS)n (SEQ ID NO: 246), (GGGGS)n (SEQ ID NO: 247), (G)n, (EAAAK)n (SEQ ID NO: 248), (GGS)n, SGSETPGTSESATPES (SEQ ID NO: 249). In some embodiments, the fusion protein comprises a linker between the N-terminal Cas9 fragment and the deaminase. In some embodiments, the fusion protein comprises a linker between the C-terminal Cas9 fragment and the deaminase. In some embodiments, the N-terminal and C-terminal fragments of napDNAbp are connected to the deaminase with a linker. In some embodiments, the N-terminal and C-terminal fragments are joined to the deaminase domain without a linker. In some embodiments, the fusion protein comprises a linker between the N-terminal Cas9 fragment and the deaminase, but does not comprise a linker between the C-terminal Cas9 fragment and the deaminase. In some embodiments, the fusion protein comprises a linker between the C-terminal Cas9 fragment and the deaminase, but does not comprise a linker between the N-terminal Cas9 fragment and the deaminase.

[0393] In some embodiments, the napDNAbp in the fusion protein is a Cas12 polypeptide, e.g., Cas12b/C2c1, or a fragment thereof. The Cas12 polypeptide can be a variant Cas12 polypeptide. In other embodiments, the N- or C-terminal fragments of the Cas12 polypeptide comprise a nucleic acid programmable DNA binding domain or a RuvC domain. In other embodiments, the fusion protein contains a linker between the Cas12 polypeptide and the catalytic domain. In other embodiments, the amino acid sequence of the linker is GGSGGS (SEQ ID NO: 250) or GSSGSETPGTSESATPESSG (SEQ ID NO: 251). In other embodiments, the linker is a rigid linker. In other embodiments of the above aspects, the linker is encoded by GGAGGCTCTGGAGGAAGC (SEQ ID NO: 252) or GGCTCTTCTGGATCTGAAACACCTGGCACAAGCGAGAGCGCCACCCCTGAGAGCTCTGGC (SEQ ID NO: 253).

[0394] Fusion proteins comprising a heterologous catalytic domain flanked by N- and C-terminal fragments of a Cas12 polypeptide are also useful for base editing in the methods as described herein. Fusion proteins comprising Cas12 and one or more deaminase domains, e.g., adenosine deaminase, or comprising an adenosine deaminase domain flanked by Cas12 sequences are also useful for highly specific and efficient base editing of target sequences. In an embodiment, a chimeric Cas12 fusion protein contains a heterologous catalytic domain (e.g., adenosine deaminase, cytidine deaminase, or adenosine deaminase and cytidine deaminase) inserted within a Cas12 polypeptide. In some embodiments, the fusion protein comprises an adenosine deaminase domain and a cytidine deaminase domain inserted within a Cas12. In some embodiments, an adenosine deaminase is fused within Cas12 and a cytidine deaminase is fused to the C-terminus. In some embodiments, an adenosine deaminase is fused within Cas12 and a cytidine deaminase fused to the N-terminus. In some embodiments, a cytidine deaminase is fused within Cas12 and an adenosine deaminase is fused to the C-terminus. In some embodiments, a cytidine deaminase is fused within Cas12 and an adenosine deaminase fused to the N-terminus. Exemplary structures of a fusion protein with an adenosine deaminase and a cytidine deaminase and a Cas12 are provided as follows:
[0395] NH2-[Cas12(adenosine deaminase)]-[cytidine deaminase]-COOH;
[0396] NH2-[cytidine deaminase]-[Cas12(adenosine deaminase)]-COOH;
[0397] NH2-[Cas12(cytidine deaminase)]-[adenosine deaminase]-COOH; or
[0398] NH2-[adenosine deaminase]-[Cas12(cytidine deaminase)]-COOH;

[0399] In some embodiments, the “-” used in the general architecture above indicates the presence of an optional linker.

[0400] In various embodiments, the catalytic domain has DNA modifying activity (e.g., deaminase activity), such as adenosine deaminase activity. In some embodiments, the adenosine deaminase is a TadA (e.g., TadA*7.10). In some embodiments, the TadA is a TadA*8. In some embodiments, a TadA*8 is fused within Cas12 and a cytidine deaminase is fused to the C-terminus. In some embodiments, a TadA*8 is fused within Cas12 and a cytidine deaminase fused to the N-terminus. In some embodiments, a cytidine deaminase is fused within Cas12 and a TadA*8 is fused to the C-terminus. In some embodiments, a cytidine deaminase is fused within Cas12 and a TadA*8 fused to the N-terminus. Exemplary structures of a fusion protein with a TadA*8 and a cytidine deaminase and a Cas12 are provided as follows:
[0401] N-[Cas12(TadA*8)]-[cytidine deaminase]-C;
[0402] N-[cytidine deaminase]-[Cas12(TadA*8)]-C;
[0403] N-[Cas12(cytidine deaminase)]-[TadA*8]-C; or
[0404] N-[TadA*8]-[Cas12(cytidine deaminase)]-C.

[0405] In some embodiments, the “-” used in the general architecture above indicates the presence of an optional linker.

[0406] In other embodiments, the fusion protein contains one or more catalytic domains. In other embodiments, at least one of the one or more catalytic domains is inserted within the Cas12 polypeptide or is fused at the Cas12 N-terminus or C-terminus. In other embodiments, at least one of the one or more catalytic domains is inserted within a loop, an alpha helix region, an unstructured portion, or a solvent accessible portion of the Cas12 polypeptide. In other embodiments, the Cas12 polypeptide is Cas12a, Cas12b, Cas12c, Cas12d, Cas12e, Cas12g, Cas12h, Cas12i, or Cas12j/CasΦ. In other embodiments, the Cas12 polypeptide has at least about 85% amino acid sequence identity to Bacillus hisashii Cas12b, Bacillus thermoamylovorans Cas12b, Bacillus sp. V3-13 Cas12b, or Alicyclobacillus acidiphilus Cas12b (SEQ ID NO: 254). In other embodiments, the Cas12 polypeptide has at least about 90% amino acid sequence identity to Bacillus hisashii Cas12b (SEQ ID NO: 255), Bacillus thermoamylovorans Cas12b, Bacillus sp. V3-13 Cas12b, or Alicyclobacillus acidiphilus Cas12b. In other embodiments, the Cas12 polypeptide has at least about 95% amino acid sequence identity to Bacillus hisashii Cas12b, Bacillus thermoamylovorans Cas12b (SEQ ID NO: 256), Bacillus sp. V3-13 Cas12b (SEQ ID NO: 257), or Alicyclobacillus acidiphilus Cas12b. In other embodiments, the Cas12 polypeptide contains or consists essentially of a fragment of Bacillus hisashii Cas12b, Bacillus thermoamylovorans Cas12b, Bacillus sp. V3-13 Cas12b, or Alicyclobacillus acidiphilus Cas12b. In embodiments, the Cas12 polypeptide contains BvCas12b (V4), which in some embodiments is expressed as 5′ mRNA Cap---5′ UTR---bhCas12b---STOP sequence---3′ UTR---120polyA tail (SEQ ID NOs: 258-260).

[0407] In other embodiments, the catalytic domain is inserted between amino acid positions 153-154, 255-256, 306-307, 980-981, 1019-1020, 534-535, 604-605, or 344-345 of BhCas12b or a corresponding amino acid residue of Cas12a, Cas12c, Cas12d, Cas12e, Cas12g, Cas12h, Cas12i, or Cas12j/CasΦ. In other embodiments, the catalytic domain is inserted between amino acids P153 and S154 of BhCas12b. In other embodiments, the catalytic domain is inserted between amino acids K255 and E256 of BhCas12b. In other embodiments, the catalytic domain is inserted between amino acids D980 and G981 of BhCas12b. In other embodiments, the catalytic domain is inserted between amino acids K1019 and L1020 of BhCas12b. In other embodiments, the catalytic domain is inserted between amino acids F534 and P535 of BhCas12b. In other embodiments, the catalytic domain is inserted between amino acids K604 and G605 of BhCas12b. In other embodiments, the catalytic domain is inserted between amino acids H344 and F345 of BhCas12b. In other embodiments, catalytic domain is inserted between amino acid positions 147 and 148, 248 and 249, 299 and 300, 991 and 992, or 1031 and 1032 of BvCas12b or a corresponding amino acid residue of Cas12a, Cas12c, Cas12d, Cas12e, Cas12g, Cas12h, Cas12i, or Cas12j/CasΦ. In other embodiments, the catalytic domain is inserted between amino acids P147 and D148 of BvCas12b. In other embodiments, the catalytic domain is inserted between amino acids G248 and G249 of BvCas12b. In other embodiments, the catalytic domain is inserted between amino acids P299 and E300 of BvCas12b. In other embodiments, the catalytic domain is inserted between amino acids G991 and E992 of BvCas12b. In other embodiments, the catalytic domain is inserted between amino acids K1031 and M1032 of BvCas12b. In other embodiments, the catalytic domain is inserted between amino acid positions 157 and 158, 258 and 259, 310 and 311, 1008 and 1009, or 1044 and 1045 of AaCas12b or a corresponding amino acid residue of Cas12a, Cas12c, Cas12d, Cas12e, Cas12g, Cas12h, Cas12i, or Cas12j/CasΦ. In other embodiments, the catalytic domain is inserted between amino acids P157 and G158 of AaCas12b. In other embodiments, the catalytic domain is inserted between amino acids V258 and G259 of AaCas12b. In other embodiments, the catalytic domain is inserted between amino acids D310 and P311 of AaCas12b. In other embodiments, the catalytic domain is inserted between amino acids G1008 and E1009 of AaCas12b. In other embodiments, the catalytic domain is inserted between amino acids G1044 and K1045 at of AaCas12b.

[0408] In other embodiments, the fusion protein contains a nuclear localization signal (e.g., a bipartite nuclear localization signal). In other embodiments, the amino acid sequence of the nuclear localization signal is MAPKKKRKVGIHGVPAA (SEQ ID NO: 261). In other embodiments of the above aspects, the nuclear localization signal is encoded by the following sequence:

(SEQ ID NO: 262)
ATGGCCCCAAAGAAGAAGCGGAAGGTCGGTATCCACGGAGTCCCAGCAG
CC.

In other embodiments, the Cas12b polypeptide contains a mutation that silences the catalytic activity of a RuvC domain. In other embodiments, the Cas12b polypeptide contains D574A, D829A and/or D952A mutations. In other embodiments, the fusion protein further contains a tag (e.g., an influenza hemagglutinin tag).

[0409] In some embodiments, the fusion protein comprises a napDNAbp domain (e.g., Cas12-derived domain) with an internally fused nucleobase editing domain (e.g., all or a portion of a deaminase domain, e.g., an adenosine deaminase domain). In some embodiments, the napDNAbp is a Cas12b. In some embodiments, the base editor comprises a BhCas12b domain with an internally fused TadA*8 domain inserted at the loci provided in Table 5 below.

TABLE 5
Insertion loci in Cas12b proteins

| | Insertion site | Inserted between aa |
|---|---|---|
| BhCas12b | | |
| position 1 | 153 | PS |
| position 2 | 255 | KE |
| position 3 | 306 | DE |
| position 4 | 980 | DG |
| position 5 | 1019 | KL |
| position 6 | 534 | FP |
| position 7 | 604 | KG |
| position 8 | 344 | HF |
| BvCas12b | | |
| position 1 | 147 | PD |
| position 2 | 248 | GG |
| position 3 | 299 | PE |
| position 4 | 991 | GE |
| position 5 | 1031 | KM |
| AaCas12b | | |
| position 1 | 157 | PG |
| position 2 | 258 | VG |
| position 3 | 310 | DP |
| position 4 | 1008 | GE |
| position 5 | 1044 | GK |

[0410] By way of nonlimiting example, an adenosine deaminase (e.g., TadA*8.13) may be inserted into a BhCas12b to produce a fusion protein (e.g., TadA*8.13-BhCas12b) that effectively edits a nucleic acid sequence.

[0411] In some embodiments, the base editing system described herein is an ABE with TadA inserted into a Cas9. Polypeptide sequences of relevant ABEs with TadA inserted into a Cas9 are provided in the attached Sequence Listing as SEQ ID NOs: 263-308.

[0412] In some embodiments, adenosine base editors were generated to insert TadA or variants thereof into the Cas9 polypeptide at the identified positions.

[0413] Exemplary, yet nonlimiting, fusion proteins are described in International PCT Application Nos. PCT/US2020/016285 and U.S. Provisional Application Nos. 62/852,228 and 62/852,224, the contents of which are incorporated by reference herein in their entireties.

### A to G Editing

[0414] In some embodiments, a base editor described herein comprises an adenosine deaminase domain. Such an adenosine deaminase domain of a base editor can facilitate the editing of an adenine (A) nucleobase to a guanine (G) nucleobase by deaminating the A to form inosine (I), which exhibits base pairing properties of G. Adenosine deaminase is capable of deaminating (i.e., removing an amine group) adenine of a deoxyadenosine residue in deoxyribonucleic acid (DNA). In some embodiments, an A-to-G base editor further comprises an inhibitor of inosine base excision repair, for example, a uracil glycosylase inhibitor (UGI) domain or a catalytically inactive inosine specific nuclease. Without wishing to be bound by any particular theory, the UGI domain or catalytically inactive inosine specific nuclease can inhibit or prevent base excision repair of a deaminated adenosine residue (e.g., inosine), which can improve the activity or efficiency of the base editor.

[0415] A base editor comprising an adenosine deaminase can act on any polynucleotide, including DNA, RNA and DNA-RNA hybrids. In certain embodiments, a base editor comprising an adenosine deaminase can deaminate a target A of a polynucleotide comprising RNA. For example, the base editor can comprise an adenosine deaminase domain capable of deaminating a target A of an RNA polynucleotide and/or a DNA-RNA hybrid polynucleotide. In an embodiment, an adenosine deaminase incorporated into a base editor comprises all or a portion of adenosine deaminase acting on RNA (ADAR, e.g., ADAR1 or ADAR2) or tRNA (ADAT). A base editor comprising an adenosine deaminase domain can also be capable of deaminating an A nucleobase of a DNA polynucleotide. In an embodiment an adenosine deaminase domain of a base editor comprises all or a portion of an ADAT comprising one or more mutations which permit the ADAT to deaminate a target A in DNA. For example, the base editor can comprise all or a portion of an ADAT from Escherichia coli (EcTadA) comprising one or more of the following mutations: D108N, A106V, D147Y, E155V, L84F, H123Y, I156F, or a corresponding mutation in another adenosine deaminase. Exemplary ADAT homolog polypeptide sequences are provided in the Sequence Listing as SEQ ID NOs: 1 and 309-315.

[0416] The adenosine deaminase can be derived from any suitable organism (e.g., E. coli). In some embodiments, the adenosine deaminase is from a prokaryote. In some embodiments, the adenosine deaminase is from a bacterium. In some embodiments, the adenosine deaminase is from Escherichia coli, Staphylococcus aureus, Salmonella typhi, Shewanella putrefaciens, Haemophilus influenzae, Caulobacter crescentus, or Bacillus subtilis. In some embodiments, the adenosine deaminase is from E. coli. In some embodiments, the adenine deaminase is a naturally-occurring adenosine deaminase that includes one or more mutations corresponding to any of the mutations provided herein (e.g., mutations in ecTadA). The corresponding residue in any homologous protein can be identified by e.g., sequence alignment and determination of homologous residues. The mutations in any naturally-occurring adenosine deaminase (e.g., having homology to ecTadA) that correspond to any of the mutations described herein (e.g., any of the mutations identified in ecTadA) can be generated accordingly.

[0417] In some embodiments, the adenosine deaminase comprises an amino acid sequence that is at least 60%, at least 65%, at least 70%, at least 75%, at least 80%, at least 85%, at least 90%, at least 95%, at least 96%, at least 97%, at least 98%, at least 99%, or at least 99.5% identical to any one of the amino acid sequences set forth in any of the adenosine deaminases provided herein. It should be appreciated that adenosine deaminases provided herein may include one or more mutations (e.g., any of the mutations provided herein). The disclosure provides any deaminase domains with a certain percent identify plus any of the mutations or combinations thereof described herein. In some embodiments, the adenosine deaminase comprises an amino acid sequence that has 1, 2, 3, 4, 5, 6, 7, 8, 9, 10, 11, 12, 13, 14, 15, 16, 17, 18, 19, 20, 21, 22, 21, 24, 25, 26, 27, 28, 29, 30, 31, 32, 33, 34, 35, 36, 37, 38, 39, 40, 41, 42, 43, 44, 45, 46, 47, 48, 49, 50, or more mutations compared to a reference sequence, or any of the adenosine deaminases provided herein. In some embodiments, the adenosine deaminase comprises an amino acid sequence that has at least 5, at least 10, at least 15, at least 20, at least 25, at least 30, at least 35, at least 40, at least 45, at least 50, at least 60, at least 70, at least 80, at least 90, at least 100, at least 110, at least 120, at least 130, at least 140, at least 150, at least 160, or at least 170 identical contiguous amino acid residues as compared to any one of the amino acid sequences known in the art or described herein.

[0418] It should be appreciated that any of the mutations provided herein (e.g., based on the TadA reference sequence) can be introduced into other adenosine deaminases, such as E. coli TadA (ecTadA), S. aureus TadA (saTadA), or other adenosine deaminases (e.g., bacterial adenosine deaminases). It would be apparent to the skilled artisan that additional deaminases may similarly be aligned to identify homologous amino acid residues that can be mutated as provided herein. Thus, any of the mutations identified in the TadA reference sequence can be made in other adenosine deaminases (e.g., ecTada) that have homologous amino acid residues. It should also be appreciated that any of the mutations provided herein can be made individually or in any combination in the TadA reference sequence or another adenosine deaminase.

[0419] In some embodiments, the adenosine deaminase comprises a D108X mutation in the TadA reference sequence, or a corresponding mutation in another adenosine deaminase, where X indicates any amino acid other than the corresponding amino acid in the wild-type adenosine deaminase. In some embodiments, the adenosine deaminase comprises a D108G, D108N, D108V, D108A, or D108Y mutation in TadA reference sequence, or a corresponding mutation in another adenosine deaminase. It should be appreciated, however, that additional deaminases may similarly be aligned to identify homologous amino acid residues that can be mutated as provided herein.

[0420] In some embodiments, the adenosine deaminase comprises an A106X mutation in TadA reference sequence, or a corresponding mutation in another adenosine deaminase, where X indicates any amino acid other than the corresponding amino acid in the wild-type adenosine deaminase. In some embodiments, the adenosine deaminase comprises an A106V mutation in TadA reference sequence, or a corresponding mutation in another adenosine deaminase (e.g., ecTadA).

[0421] In some embodiments, the adenosine deaminase comprises a E155X mutation in TadA reference sequence, or a corresponding mutation in another adenosine deaminase, where the presence of X indicates any amino acid other than the corresponding amino acid in the wild-type adenosine deaminase. In some embodiments, the adenosine deaminase comprises a E155D, E155G, or E155V mutation in TadA reference sequence, or a corresponding mutation in another adenosine deaminase (e.g., ecTadA).

[0422] In some embodiments, the adenosine deaminase comprises a D147X mutation in TadA reference sequence, or a corresponding mutation in another adenosine deaminase, where the presence of X indicates any amino acid other than the corresponding amino acid in the wild-type adenosine deaminase. In some embodiments, the adenosine deaminase comprises a D147Y, mutation in TadA reference sequence, or a corresponding mutation in another adenosine deaminase (e.g., ecTadA).

[0423] In some embodiments, the adenosine deaminase comprises an A106X, E155X, or D147X, mutation in the TadA reference sequence, or a corresponding mutation in another adenosine deaminase (e.g., ecTadA), where X indicates any amino acid other than the corresponding amino acid in the wild-type adenosine deaminase. In some embodiments, the adenosine deaminase comprises an E155D, E155G, or E155V mutation. In some embodiments, the adenosine deaminase comprises a D147Y.

[0424] It should also be appreciated that any of the mutations provided herein may be made individually or in any combination in ecTadA or another adenosine deaminase. For example, an adenosine deaminase may contain a D108N, a A106V, a E155V, and/or a D147Y mutation in TadA reference sequence, or a corresponding mutation in another adenosine deaminase (e.g., ecTadA). In some embodiments, an adenosine deaminase comprises the following group of mutations (groups of mutations are separated by a “;”) in a TadA reference sequence, or corresponding mutations in another adenosine deaminase: D108N and A106V; D108N and E155V; D108N and D147Y; A106V and E155V; A106V and D147Y; E155V and D147Y; D108N, A106V, and E155V; D108N, A106V, and D147Y; D108N, E155V, and D147Y; A106V, E155V, and D147Y; and D108N, A106V, E155V, and D147Y. It should be appreciated, however, that any combination of corresponding mutations provided herein may be made in an adenosine deaminase (e.g., ecTadA).

[0425] In some embodiments, the adenosine deaminase comprises a combination of mutations in a TadA reference sequence (e.g., TadA*7.10), or corresponding mutations in another adenosine deaminase: V82G+Y147T+Q154S; I76Y+V82G+Y147T+Q154S; L36H+V82G+Y147T+Q154S+N157K; V82G+Y147D+F149Y+Q154S+D167N; L36H+V82G+Y147D+F149Y+Q154S+N157K+D167N; L36H+I76Y+V82G+Y147T+Q154S+N157K; I76Y+V82G+Y147D+F149Y+Q154S+D167N; or L36H+I76Y+V82G+Y147D+F149Y+Q154S+N157K+D167N.

[0426] In some embodiments, the adenosine deaminase comprises one or more of a H8X, T17X, L18X, W23X, L34X, W45X, R51X, A56X, E59X, E85X, M94X, I95X, V102X, F104X, A106X, R107X, D108X, K110X, M118X, N127X, A138X, F149X, M151X, R153X, Q154X, I156X, and/or K157X mutation in TadA reference sequence, or one or more corresponding mutations in another adenosine deaminase, where the presence of X indicates any amino acid other than the corresponding amino acid in the wild-type adenosine deaminase. In some embodiments, the adenosine deaminase comprises one or more of H8Y, T17S, L18E, W23L, L34S, W45L, R51H, A56E, or A56S, E59G, E85K, or E85G, M94L, I95L, V102A, F104L, A106V, R107C, or R107H, or R107P, D108G, or D108N, or D108V, or D108A, or D108Y, K110I, M118K, N127S, A138V, F149Y, M151V, R153C, Q154L, I156D, and/or K157R mutation in TadA reference sequence, or one or more corresponding mutations in another adenosine deaminase.

[0427] In some embodiments, the adenosine deaminase comprises one or more of a H8X, D108X, and/or N127X mutation in TadA reference sequence, or one or more corresponding mutations in another adenosine deaminase, where X indicates the presence of any amino acid. In some embodiments, the adenosine deaminase comprises one or more of a H8Y, D108N, and/or N127S mutation in TadA reference sequence, or one or more corresponding mutations in another adenosine deaminase.

[0428] In some embodiments, the adenosine deaminase comprises one or more of H8X, R26X, M61X, L68X, M70X, A106X, D108X, A109X, N127X, D147X, R152X, Q154X, E155X, K161X, Q163X, and/or T166X mutation in TadA reference sequence, or one or more corresponding mutations in another adenosine deaminase, where X indicates the presence of any amino acid other than the corresponding amino acid in the wild-type adenosine deaminase. In some embodiments, the adenosine deaminase comprises one or more of H8Y, R26W, M61I, L68Q, M70V, A106T, D108N, A109T, N127S, D147Y, R152C, Q154H or Q154R, E155G or E155V or E155D, K161Q, Q163H, and/or T166P mutation in TadA reference sequence, or one or more corresponding mutations in another adenosine deaminase.

[0429] In some embodiments, the adenosine deaminase comprises one, two, three, four, five, or six mutations selected from the group consisting of H8X, D108X, N127X, D147X, R152X, and Q154X in TadA reference sequence, or a corresponding mutation or mutations in another adenosine deaminase (e.g., ecTadA), where X indicates the presence of any amino acid other than the corresponding amino acid in the wild-type adenosine deaminase. In some embodiments, the adenosine deaminase comprises one, two, three, four, five, six, seven, or eight mutations selected from the group consisting of H8X, M61X, M70X, D108X, N127X, Q154X, E155X, and Q163X in TadA reference sequence, or a corresponding mutation or mutations in another adenosine deaminase (e.g., ecTadA), where X indicates the presence of any amino acid other than the corresponding amino acid in the wild-type adenosine deaminase. In some embodiments, the adenosine deaminase comprises one, two, three, four, or five, mutations selected from the group consisting of H8X, D108X, N127X, E155X, and T166X in TadA reference sequence, or a corresponding mutation or mutations in another adenosine deaminase (e.g., ecTadA), where X indicates the presence of any amino acid other than the corresponding amino acid in the wild-type adenosine deaminase.

[0430] In some embodiments, the adenosine deaminase comprises one, two, three, four, five, or six mutations selected from the group consisting of H8X, A106X, and D108X, or a corresponding mutation or mutations in another adenosine deaminase, where X indicates the presence of any amino acid other than the corresponding amino acid in the wild-type adenosine deaminase. In some embodiments, the adenosine deaminase comprises one, two, three, four, five, six, seven, or eight mutations selected from the group consisting of H8X, R26X, L68X, D108X, N127X, D147X, and E155X, or a corresponding mutation or mutations in another adenosine deaminase, where X indicates the presence of any amino acid other than the corresponding amino acid in the wild-type adenosine deaminase.

[0431] In some embodiments, the adenosine deaminase comprises one, two, three, four, five, six, or seven mutations selected from the group consisting of H8X, R126X, L68X, D108X, N127X, D147X, and E155X in TadA reference sequence, or a corresponding mutation or mutations in another adenosine deaminase, where X indicates the presence of any amino acid other than the corresponding amino acid in the wild-type adenosine deaminase. In some embodiments, the adenosine deaminase comprises one, two, three, four, or five mutations selected from the group consisting of H8X, D108X, A109X, N127X, and E155X in TadA reference sequence, or a corresponding mutation or mutations in another adenosine deaminase, where X indicates the presence of any amino acid other than the corresponding amino acid in the wild-type adenosine deaminase.

[0432] In some embodiments, the adenosine deaminase comprises one, two, three, four, five, or six mutations selected from the group consisting of H8Y, D108N, N127S, D147Y, R152C, and Q154H in TadA reference sequence, or a corresponding mutation or mutations in another adenosine deaminase (e.g., ecTadA). In some embodiments, the adenosine deaminase comprises one, two, three, four, five, six, seven, or eight mutations selected from the group consisting of H8Y, M61I, M70V, D108N, N127S, Q154R, E155G and Q163H in TadA reference sequence, or a corresponding mutation or mutations in another adenosine deaminase (e.g., ecTadA). In some embodiments, the adenosine deaminase comprises one, two, three, four, or five, mutations selected from the group consisting of H8Y, D108N, N127S, E155V, and T166P in TadA reference sequence, or a corresponding mutation or mutations in another adenosine deaminase (e.g., ecTadA). In some embodiments, the adenosine deaminase comprises one, two, three, four, five, or six mutations selected from the group consisting of H8Y, A106T, D108N, N127S, E155D, and K161Q in TadA reference sequence, or a corresponding mutation or mutations in another adenosine deaminase (e.g., ecTadA). In some embodiments, the adenosine deaminase comprises one, two, three, four, five, six, seven, or eight mutations selected from the group consisting of H8Y, R26W, L68Q, D108N, N127S, D147Y, and E155V in TadA reference sequence, or a corresponding mutation or mutations in another adenosine deaminase (e.g., ecTadA). In some embodiments, the adenosine deaminase comprises one, two, three, four, or five, mutations selected from the group consisting of H8Y, D108N, A109T, N127S, and E155G in TadA reference sequence, or a corresponding mutation or mutations in another adenosine deaminase (e.g., ecTadA).

[0433] In some embodiments, the adenosine deaminase comprises one or more of the or one or more corresponding mutations in another adenosine deaminase. In some embodiments, the adenosine deaminase comprises a D108N, D108G, or D108V mutation in TadA reference sequence, or corresponding mutations in another adenosine deaminase. In some embodiments, the adenosine deaminase comprises a A106V and D108N mutation in TadA reference sequence, or corresponding mutations in another adenosine deaminase. In some embodiments, the adenosine deaminase comprises R107C and D108N mutations in TadA reference sequence, or corresponding mutations in another adenosine deaminase. In some embodiments, the adenosine deaminase comprises a H8Y, D108N, N127S, D147Y, and Q154H mutation in TadA reference sequence, or corresponding mutations in another adenosine deaminase. In some embodiments, the adenosine deaminase comprises a H8Y, D108N, N127S, D147Y, and E155V mutation in TadA reference sequence, or corresponding mutations in another adenosine deaminase. In some embodiments, the adenosine deaminase comprises a D108N, D147Y, and E155V mutation in TadA reference sequence, or corresponding mutations in another adenosine deaminase. In some embodiments, the adenosine deaminase comprises a H8Y, D108N, and N127S mutation in TadA reference sequence, or corresponding mutations in another adenosine deaminase. In some embodiments, the adenosine deaminase comprises a A106V, D108N, D147Y, and E155V mutation in TadA reference sequence, or corresponding mutations in another adenosine deaminase (e.g., ecTadA).

[0434] In some embodiments, the adenosine deaminase comprises one or more of S2X, H8X, I49X, L84X, H123X, N127X, I156X, and/or K160X mutation in TadA reference sequence, or one or more corresponding mutations in another adenosine deaminase, where the presence of X indicates any amino acid other than the corresponding amino acid in the wild-type adenosine deaminase. In some embodiments, the adenosine deaminase comprises one or more of S2A, H8Y, I49F, L84F, H123Y, N127S, I156F, and/or K160S mutation in TadA reference sequence, or one or more corresponding mutations in another adenosine deaminase (e.g., ecTadA).

[0435] In some embodiments, the adenosine deaminase comprises an L84X mutation adenosine deaminase, where X indicates any amino acid other than the corresponding amino acid in the wild-type adenosine deaminase. In some embodiments, the adenosine deaminase comprises an L84F mutation in TadA reference sequence, or a corresponding mutation in another adenosine deaminase (e.g., ecTadA).

[0436] In some embodiments, the adenosine deaminase comprises an H123X mutation in TadA reference sequence, or a corresponding mutation in another adenosine deaminase, where X indicates any amino acid other than the corresponding amino acid in the wild-type adenosine deaminase. In some embodiments, the adenosine deaminase comprises an H123Y mutation in TadA reference sequence, or a corresponding mutation in another adenosine deaminase.

[0437] In some embodiments, the adenosine deaminase comprises an I156X mutation in TadA reference sequence, or a corresponding mutation in another adenosine deaminase, where X indicates any amino acid other than the corresponding amino acid in the wild-type adenosine deaminase. In some embodiments, the adenosine deaminase comprises an I156F mutation in TadA reference sequence, or a corresponding mutation in another adenosine deaminase.

[0438] In some embodiments, the adenosine deaminase comprises one, two, three, four, five, six, or seven mutations selected from the group consisting of L84X, A106X, D108X, H123X, D147X, E155X, and I156X in TadA reference sequence, or a corresponding mutation or mutations in another adenosine deaminase, where X indicates the presence of any amino acid other than the corresponding amino acid in the wild-type adenosine deaminase. In some embodiments, the adenosine deaminase comprises one, two, three, four, five, or six mutations selected from the group consisting of S2X, I49X, A106X, D108X, D147X, and E155X in TadA reference sequence, or a corresponding mutation or mutations in another adenosine deaminase, where X indicates the presence of any amino acid other than the corresponding amino acid in the wild-type adenosine deaminase. In some embodiments, the adenosine deaminase comprises one, two, three, four, or five mutations selected from the group consisting of H8X, A106X, D108X, N127X, and K160X in TadA reference sequence, or a corresponding mutation or mutations in another adenosine deaminase, where X indicates the presence of any amino acid other than the corresponding amino acid in the wild-type adenosine deaminase.

[0439] In some embodiments, the adenosine deaminase comprises one, two, three, four, five, six, or seven mutations selected from the group consisting of L84F, A106V, D108N, H123Y, D147Y, E155V, and I156F in TadA reference sequence, or a corresponding mutation or mutations in another adenosine deaminase. In some embodiments, the adenosine deaminase comprises one, two, three, four, five, or six mutations selected from the group consisting of S2A, I49F, A106V, D108N, D147Y, and E155V in TadA reference sequence.

[0440] In some embodiments, the adenosine deaminase comprises one, two, three, four, or five mutations selected from the group consisting of H8Y, A106T, D108N, N127S, and K160S in TadA reference sequence, or a corresponding mutation or mutations in another adenosine deaminase.

[0441] In some embodiments, the adenosine deaminase comprises one or more of a E25X, R26X, R107X, A142X, and/or A143X mutation in TadA reference sequence, or one or more corresponding mutations in another adenosine deaminase, where the presence of X indicates any amino acid other than the corresponding amino acid in the wild-type adenosine deaminase. In some embodiments, the adenosine deaminase comprises one or more of E25M, E25D, E25A, E25R, E25V, E25S, E25Y, R26G, R26N, R26Q, R26C, R26L, R26K, R107P, R107K, R107A, R107N, R107W, R107H, R107S, A142N, A142D, A142G, A143D, A143G, A143E, A143L, A143W, A143M, A143S, A143Q, and/or A143R mutation in TadA reference sequence, or one or more corresponding mutations in another adenosine deaminase. In some embodiments, the adenosine deaminase comprises one or more of the mutations described herein corresponding to TadA reference sequence, or one or more corresponding mutations in another adenosine deaminase.

[0442] In some embodiments, the adenosine deaminase comprises an E25X mutation in TadA reference sequence, or a corresponding mutation in another adenosine deaminase, where X indicates any amino acid other than the corresponding amino acid in the wild-type adenosine deaminase. In some embodiments, the adenosine deaminase comprises an E25M, E25D, E25A, E25R, E25V, E25S, or E25Y mutation in TadA reference sequence, or a corresponding mutation in another adenosine deaminase (e.g., ecTadA).

[0443] In some embodiments, the adenosine deaminase comprises an R26X mutation in TadA reference sequence, or a corresponding mutation in another adenosine deaminase, where X indicates any amino acid other than the corresponding amino acid in the wild-type adenosine deaminase. In some embodiments, the adenosine deaminase comprises R26G, R26N, R26Q, R26C, R26L, or R26K mutation in TadA reference sequence, or a corresponding mutation in another adenosine deaminase (e.g., ecTadA).

[0444] In some embodiments, the adenosine deaminase comprises an R107X mutation in TadA reference sequence, or a corresponding mutation in another adenosine deaminase, where X indicates any amino acid other than the corresponding amino acid in the wild-type adenosine deaminase. In some embodiments, the adenosine deaminase comprises an R107P, R107K, R107A, R107N, R107W, R107H, or R107S mutation in TadA reference sequence, or a corresponding mutation in another adenosine deaminase (e.g., ecTadA).

[0445] In some embodiments, the adenosine deaminase comprises an A142X mutation in TadA reference sequence, or a corresponding mutation in another adenosine deaminase, where X indicates any amino acid other than the corresponding amino acid in the wild-type adenosine deaminase. In some embodiments, the adenosine deaminase comprises an A142N, A142D, A142G, mutation in TadA reference sequence, or a corresponding mutation in another adenosine deaminase (e.g., ecTadA).

[0446] In some embodiments, the adenosine deaminase comprises an A143X mutation in TadA reference sequence, or a corresponding mutation in another adenosine deaminase, where X indicates any amino acid other than the corresponding amino acid in the wild-type adenosine deaminase. In some embodiments, the adenosine deaminase comprises an A143D, A143G, A143E, A143L, A143W, A143M, A143S, A143Q, and/or A143R mutation in TadA reference sequence, or a corresponding mutation in another adenosine deaminase (e.g., ecTadA).

[0447] In some embodiments, the adenosine deaminase comprises one or more of a H36X, N37X, P48X, I49X, R51X, M70X, N72X, D77X, E134X, S146X, Q154X, K157X, and/or K161X mutation in TadA reference sequence, or one or more corresponding mutations in another adenosine deaminase, where the presence of X indicates any amino acid other than the corresponding amino acid in the wild-type adenosine deaminase. In some embodiments, the adenosine deaminase comprises one or more of H36L, N37T, N37S, P48T, P48L, I49V, R51H, R51L, M70L, N72S, D77G, E134G, S146R, S146C, Q154H, K157N, and/or K161T mutation in TadA reference sequence, or one or more corresponding mutations in another adenosine deaminase (e.g., ecTadA).

[0448] In some embodiments, the adenosine deaminase comprises an H36X mutation in TadA reference sequence, or a corresponding mutation in another adenosine deaminase, where X indicates any amino acid other than the corresponding amino acid in the wild-type adenosine deaminase. In some embodiments, the adenosine deaminase comprises an H36L mutation in TadA reference sequence, or a corresponding mutation in another adenosine deaminase.

[0449] In some embodiments, the adenosine deaminase comprises an N37X mutation in TadA reference sequence, or a corresponding mutation in another adenosine deaminase, where X indicates any amino acid other than the corresponding amino acid in the wild-type adenosine deaminase. In some embodiments, the adenosine deaminase comprises an N37T or N37S mutation in TadA reference sequence, or a corresponding mutation in another adenosine deaminase.

[0450] In some embodiments, the adenosine deaminase comprises an P48X mutation in TadA reference sequence, or a corresponding mutation in another adenosine deaminase, where X indicates any amino acid other than the corresponding amino acid in the wild-type adenosine deaminase. In some embodiments, the adenosine deaminase comprises an P48T or P48L mutation in TadA reference sequence, or a corresponding mutation in another adenosine deaminase.

[0451] In some embodiments, the adenosine deaminase comprises an R51X mutation in TadA reference sequence, or a corresponding mutation in another adenosine deaminase, where X indicates any amino acid other than the corresponding amino acid in the wild-type adenosine deaminase. In some embodiments, the adenosine deaminase comprises an R51H or R51L mutation in TadA reference sequence, or a corresponding mutation in another adenosine deaminase.

[0452] In some embodiments, the adenosine deaminase comprises an S146X mutation in TadA reference sequence, or a corresponding mutation in another adenosine deaminase, where X indicates any amino acid other than the corresponding amino acid in the wild-type adenosine deaminase. In some embodiments, the adenosine deaminase comprises an S146R or S146C mutation in TadA reference sequence, or a corresponding mutation in another adenosine deaminase.

[0453] In some embodiments, the adenosine deaminase comprises an K157X mutation in TadA reference sequence, or a corresponding mutation in another adenosine deaminase, where X indicates any amino acid other than the corresponding amino acid in the wild-type adenosine deaminase. In some embodiments, the adenosine deaminase comprises a K157N mutation in TadA reference sequence, or a corresponding mutation in another adenosine deaminase.

[0454] In some embodiments, the adenosine deaminase comprises an P48X mutation in TadA reference sequence, or a corresponding mutation in another adenosine deaminase, where X indicates any amino acid other than the corresponding amino acid in the wild-type adenosine deaminase. In some embodiments, the adenosine deaminase comprises a P48S, P48T, or P48A mutation in TadA reference sequence, or a corresponding mutation in another adenosine deaminase.

[0455] In some embodiments, the adenosine deaminase comprises an A142X mutation in TadA reference sequence, or a corresponding mutation in another adenosine deaminase, where X indicates any amino acid other than the corresponding amino acid in the wild-type adenosine deaminase. In some embodiments, the adenosine deaminase comprises a A142N mutation in TadA reference sequence, or a corresponding mutation in another adenosine deaminase.

[0456] In some embodiments, the adenosine deaminase comprises an W23X mutation in TadA reference sequence, or a corresponding mutation in another adenosine deaminase, where X indicates any amino acid other than the corresponding amino acid in the wild-type adenosine deaminase. In some embodiments, the adenosine deaminase comprises a W23R or W23L mutation in TadA reference sequence, or a corresponding mutation in another adenosine deaminase.

[0457] In some embodiments, the adenosine deaminase comprises an R152X mutation in TadA reference sequence, or a corresponding mutation in another adenosine deaminase, where X indicates any amino acid other than the corresponding amino acid in the wild-type adenosine deaminase. In some embodiments, the adenosine deaminase comprises a R152P or R52H mutation in TadA reference sequence, or a corresponding mutation in another adenosine deaminase.

[0458] In one embodiment, the adenosine deaminase may comprise the mutations H36L, R51L, L84F, A106V, D108N, H123Y, S146C, D147Y, E155V, I156F, and K157N. In some embodiments, the adenosine deaminase comprises the following combination of mutations relative to TadA reference sequence, where each mutation of a combination is separated by a “_” and each combination of mutations is between parentheses:
[0459] (A106V_D108N),
[0460] (R107C_D108N),
[0461] (H8Y_D108N_N127S_D147Y_Q154H),
[0462] (H8Y_D108N_N127S_D147Y_E155V),
[0463] (D108N_D147Y_E155V),
[0464] (H8Y_D108N_N127S),
[0465] (H8Y_D108N_N127S_D147Y_Q154H),
[0466] (A106V_D108N_D147Y_E155V),
[0467] (D108Q_D147Y_E155V),
[0468] (D108M_D147Y_E155V),
[0469] (D108L_D147Y_E155V),
[0470] (D108K_D147Y_E155V),
[0471] (D108I_D147Y_E155V),
[0472] (D108F_D147Y_E155V),
[0473] (A106V_D108N_D147Y),
[0474] (A106V_D108M_D147Y_E155V),
[0475] (E59A_A106V_D108N_D147Y_E155V),
[0476] (E59A cat dead_A106V_D108N_D147Y_E155V),
[0477] (L84F_A106V_D108N_H123Y_D147Y_E155V_I156Y),
[0478] (L84F_A106V_D108N_H123Y_D147Y_E155V_I156F),
[0479] (D103A_D104N),
[0480] (G22P_D103A_D104N),
[0481] (D103A_D104N_S138A),
[0482] (R26G_L84F_A106V_R107H_D108N_H123Y_A142N_A143D_D147Y_E155V_I156F),
[0483] (E25G_R26G_L84F_A106V_R107H_D108N_H123Y_A142N_A143D_D147Y_E155V_I156F)
[0484] (E25D_R26G_L84F_A106V_R107K_D108N_H123Y_A142N_A143G_D147Y_E155V_I156F),
[0485] (R26Q_L84F_A106V_D108N_H123Y_A142N_D147Y_E155V_I156F),
[0486] (E25M_R26G_L84F_A106V_R107P_D108N_H123Y_A142N_A143D_D147Y_E155V_I156F),
[0487] (R26C_L84F_A106V_R107H_D108N_H123Y_A142N_D147Y_E155V_I156F),
[0488] (L84F_A106V_D108N_H123Y_A142N_A143L_D147Y_E155V_I156F),
[0489] (R26G_L84F_A106V_D108N_H123Y_A142N_D147Y_E155V_I156F),
[0490] (E25A_R26G_L84F_A106V_R107N_D108N_H123Y_A142N_A143E_D147Y_E155V_I156F),
[0491] (R26G_L84F_A106V_R107H_D108N_H123Y_A142N_A143D_D147Y_E155V_I156F),
[0492] (A106V_D108N_A142N_D147Y_E155V),
[0493] (R26G_A106V_D108N_A142N_D147Y_E155V),
[0494] (E25D_R26G_A106V_R107K_D108N_A142N_A143G_D147Y_E155V),
[0495] (R26G_A106V_D108N_R107H_A142N_A143D_D147Y_E155V),
[0496] (E25D_R26G_A106V_D108N_A142N_D147Y_E155V),
[0497] (A106V_R107K_D108N_A142N_D147Y_E155V),
[0498] (A106V_D108N_A142N_A143G_D147Y_E155V),
[0499] (A106V_D108N_A142N_A143L_D147Y_E155V),
[0500] (H36L_R51L_L84F_A106V_D108N_H123Y_S146C_D147Y_E155V_I156F_K157N),
[0501] (N37T_P48T_M70L_L84F_A106V_D108N_H123Y_D147Y_I49V_E155V_I156F),
[0502] (N37S_L84F_A106V_D108N_H123Y_D147Y_E155V_I156F_K161T),
[0503] (H36L_L84F_A106V_D108N_H123Y_D147Y_Q154H_E155V_I156F),
[0504] (N72S_L84F_A106V_D108N_H123Y_S146R_D147Y_E155V_I156F),
[0505] (H36L_P48L_L84F_A106V_D108N_H123Y_E134G_D147Y_E155V_I156F),
[0506] (H36L_L84F_A106V_D108N_H123Y_D147Y_E155V_I156F_K157N)
[0507] (H36L_L84F_A106V_D108N_H123Y_S146C_D147Y_E155V_I156F),
[0508] (L84F_A106V_D108N_H123Y_S146R_D147Y_E155V_I156F_K161T),
[0509] (N37S_R51H_D77G_L84F_A106V_D108N_H123Y_D147Y_E155V_I156F),
[0510] (R51L_L84F_A106V_D108N_H123Y_D147Y_E155V_I156F_K157N),
[0511] (D24G_Q71R_L84F_H96L_A106V_D108N_H123Y_D147Y_E155V_I156F_K160E),
[0512] (H36L_G67V_L84F_A106V_D108N_H123Y_S146T_D147Y_E155V_I156F),
[0513] (Q71L_L84F_A106V_D108N_H123Y_L137M_A143E_D147Y_E155V_I156F),
[0514] (E25G_L84F_A106V_D108N_H123Y_D147Y_E155V_156F_Q159L),
[0515] (L84F_A91T_F104I_A106V_D108N_H123Y_D147Y_E155V_I156F),
[0516] (N72D_L84F_A106V_D108N_H123Y_G125A_D147Y_E155V_I156F),
[0517] (P48S_L84F_S97C_A106V_D108N_H123Y_D147Y_E155V_I156F),
[0518] (W23G_L84F_A106V_D108N_H123Y_D147Y_E155V_I156F),
[0519] (D24G_P48L_Q71R_L84F_A106V_D108N_H123Y_D147Y_E155V_I156F_Q159L),
[0520] (L84F_A106V_D108N_H123Y_A142N_D147Y_E155V_I156F),
[0521] (H36L_R51L_L84F_A106V_D108N_H123Y_A142N_S146C_D147Y_E155V_I156F_K157N),
[0522] (N37S_L84F_A106V_D108N_H123Y_A142N_D147Y_E155V_I156F_K161T),
[0523] (L84F_A106V_D108N_D147Y_E155V_I156F),
[0524] (R51L_L84F_A106V_D108N_H123Y_S146C_D147Y_E155V_I156F_K157N_K161T),
[0525] (L84F_A106V_D108N_H123Y_S146C_D147Y_E155V_I156F_K161T),
[0526] (L84F_A106V_D108N_H123Y_S146C_D147Y_E155V_I156F_K157N_K160E_K161T),
[0527] (L84F_A106V_D108N_H123Y_S146C_D147Y_E155V_I156F_K157N_K160E),
[0528] (R74Q_L84F_A106V_D108N_H123Y_D147Y_E155V_I156F),
[0529] (R74A_L84F_A106V_D108N_H123Y_D147Y_E155V_I156F),
[0530] (L84F_A106V_D108N_H123Y_D147Y_E155V_I156F),
[0531] (R74Q_L84F_A106V_D108N_H123Y_D147Y_E155V_I156F),
[0532] (L84F_R98Q_A106V_D108N_H123Y_D147Y_E155V_I156F),
[0533] (L84F_A106V_D108N_H123Y_R129Q_D147Y_E155V_1156F),
[0534] (P48S_L84F_A106V_D108N_H123Y_A142N_D147Y_E155V_I156F),
[0535] (P48S_A142N),
[0536] (P48T_I49V_L84F_A106V_D108N_H123Y_A142N_D147Y_E155V_I156F_L157N),
[0537] (P48T_I49V_A142N),
[0538] (H36L_P48S_R51L_L84F_A106V_D108N_H123Y_S146C_D147Y_E155V_I156F_K157N),
[0539] (H36L_P48S_R51L_L84F_A106V_D108N_H123Y_S146C_A142N_D147Y_E155V_I156F
[0540] (H36L_P48T_I49V_R51L_L84F_A106V_D108N_H123Y_S146C_D147Y_E155V_I156F_K157N),
[0541] (H36L_P48T_I49V_R51L_L84F_A106V_D108N_H123Y_A142N_S146C_D147Y_E155V_I156F_K157N),
[0542] (H36L_P48A_R51L_L84F_A106V_D108N_H123Y_S146C_D147Y_E155V_I156F_K157N),
[0543] (H36L_P48A_R51L_L84F_A106V_D108N_H123Y_A142N_S146C_D147Y_E155V_I156F_K157N),
[0544] (H36L_P48A_R51L_L84F_A106V_D108N_H123Y_S146C_A142N_D147Y_E155V_I156F_K157N),
[0545] (W23L_H36L_P48A_R51L_L84F_A106V_D108N_H123Y_S146C_D147Y_E155V_I156F_K157N),
[0546] (W23R_H36L_P48A_R51L_L84F_A106V_D108N_H123Y_S146C_D147Y_E155V_I156F_K157N),
[0547] (W23L_H36L_P48A_R51L_L84F_A106V_D108N_H123Y_S146R_D147Y_E155V_I156F_K161T),
[0548] (H36L_P48A_R51L_L84F_A106V_D108N_H123Y_S146C_D147Y_R152H_E155V_I156F_K157N),
[0549] (H36L_P48A_R51L_L84F_A106V_D108N_H123Y_S146C_D147Y_R152P_E155V_I156F_K157N),
[0550] (W23L_H36L_P48A_R51L_L84F_A106V_D108N_H123Y_S146C_D147Y_R152P_E155V_I156F_K157N),
[0551] (W23L_H36L_P48A_R51L_L84F_A106V_D108N_H123Y_A142A_S146C_D147Y_E155V_I 156F_K157N),
[0552] (W23L_H36L_P48A_R51L_L84F_A106V_D108N_H123Y_A142A_S146C_D147Y_R152P_E155V_I156F_K157N),
[0553] (W23L_H36L_P48A_R51L_L84F_A106V_D108N_H123Y_S146R_D147Y_E155V_I156F_K161T),
[0554] (W23R_H36L_P48A_R51L_L84F_A106V_D108N_H123Y_S146C_D147Y_R152P_E155V_I156F_K157N),
[0555] (H36L_P48A_R51L_L84F_A106V_D108N_H123Y_A142N_S146C_D147Y_R152P_E155 V_I156F_K157N).

[0556] In some embodiments, the TadA deaminase is TadA variant. In some embodiments, the TadA variant is TadA*7.10. In particular embodiments, the fusion proteins or complexes comprise a single TadA*7.10 domain (e.g., provided as a monomer). In other embodiments, the fusion protein comprises TadA*7.10 and TadA(wt), which are capable of forming heterodimers. In one embodiment, a fusion protein of the invention comprises a wild-type TadA linked to TadA*7.10, which is linked to Cas9 nickase.

[0557] In some embodiments, TadA*7.10 comprises at least one alteration. In some embodiments, the adenosine deaminase comprises an alteration in the following sequence:

TadA*7.10
(SEQ ID NO: 1)
MSEVEFSHEYWMRHALTLAKRARDEREVPVGAVLVLNNRVIGEGWNRAI
GLHDPTAHAEIMALRQGGLVMQNYRLIDATLYVTFEPCVMCAGAMIHSR
IGRVVFGVRNAKTGAAGSLMDVLHYPGMNHRVEITEGILADECAALLCY
FFRMPRQVFNAQKKAQSSTD

[0558] In some embodiments, TadA*7.10 comprises an alteration at amino acid 82 and/or 166. In particular embodiments, TadA*7.10 comprises one or more of the following alterations: Y147T, Y147R, Q154S, Y123H, V82S, T166R, and/or Q154R. In other embodiments, a variant of TadA*7.10 comprises a combination of alterations selected from the group of: Y147T+Q154R; Y147T+Q154S; Y147R+Q154S; V82S+Q154S; V82S+Y147R; V82S+Q154R; V82S+Y123H; I76Y+V82S; V82S+Y123H+Y147T; V82S+Y123H+Y147R; V82S+Y123H+Q154R; Y147R+Q154R+Y123H; Y147R+Q154R+176Y; Y147R+Q154R+T166R; Y123H+Y147R+Q154R+I76Y; V82S+Y123H+Y147R+Q154R; and I76Y+V82S+Y123H+Y147R+Q154R.

[0559] In some embodiments, a variant of TadA*7.10 comprises one or more of alterations selected from the group of L36H, I76Y, V82G, Y147T, Y147D, F149Y, Q154S, N157K, and/or D167N. In some embodiments, a variant of TadA*7.10 comprises V82G, Y147T/D, Q154S, and one or more of L36H, I76Y, F149Y, N157K, and D167N. In other embodiments, a variant of TadA*7.10 comprises a combination of alterations selected from the group of: V82G+Y147T+Q154S; I76Y+V82G+Y147T+Q154S; L36H+V82G+Y147T+Q154S+N157K; V82G+Y147D+F149Y+Q154S+D167N; L36H+V82G+Y147D+F149Y+Q154S+N157K+D167N; L36H+I76Y+V82G+Y147T+Q154S+N157K; I76Y+V82G+Y147D+F149Y+Q154S+D167N; L36H+I76Y+V82G+Y147D+F149Y+Q154S+N157K+D167N.

[0560] In some embodiments, an adenosine deaminase variant (e.g., TadA*8) comprises a deletion. In some embodiments, an adenosine deaminase variant comprises a deletion of the C terminus. In particular embodiments, an adenosine deaminase variant comprises a deletion of the C terminus beginning at residue 149, 150, 151, 152, 153, 154, 155, 156, and 157, relative to TadA*7.10, the TadA reference sequence, or a corresponding mutation in another TadA.

[0561] In other embodiments, an adenosine deaminase variant (e.g., TadA*8) is a monomer comprising one or more of the following alterations: Y147T, Y147R, Q154S, Y123H, V82S, T166R, and/or Q154R, relative to TadA*7.10, the TadA reference sequence, or a corresponding mutation in another TadA. In other embodiments, the adenosine deaminase variant (TadA*8) is a monomer comprising a combination of alterations selected from the group of: Y147T+Q154R; Y147T+Q154S; Y147R+Q154S; V82S+Q154S; V82S+Y147R; V82S+Q154R; V82S+Y123H; I76Y+V82S; V82S+Y123H+Y147T; V82S+Y123H+Y147R; V82S+Y123H+Q154R; Y147R+Q154R+Y123H; Y147R+Q154R+I76Y; Y147R+Q154R+T166R; Y123H+Y147R+Q154R+I76Y; V82S+Y123H+Y147R+Q154R; and I76Y+V82S+Y123H+Y147R+Q154R, relative to TadA*7.10, the TadA reference sequence, or a corresponding mutation in another TadA.

[0562] In other embodiments, the adenosine deaminase variant is a homodimer comprising two adenosine deaminase domains (e.g., TadA*8) each having one or more of the following alterations Y147T, Y147R, Q154S, Y123H, V82S, T166R, and/or Q154R, relative to TadA*7.10, the TadA reference sequence, or a corresponding mutation in another TadA. In other embodiments, the adenosine deaminase variant is a homodimer comprising two adenosine deaminase domains (e.g., TadA*8) each having a combination of alterations selected from the group of: Y147T+Q154R; Y147T+Q154S; Y147R+Q154S; V82S+Q154S; V82S+Y147R; V82S+Q154R; V82S+Y123H; I76Y+V82S; V82S+Y123H+Y147T; V82S+Y123H+Y147R; V82S+Y123H+Q154R; Y147R+Q154R+Y123H; Y147R+Q154R+176Y; Y147R+Q154R+T166R; Y123H+Y147R+Q154R+I76Y; V82S+Y123H+Y147R+Q154R; and I76Y+V82S+Y123H+Y147R+Q154R, relative to TadA*7.10, the TadA reference sequence, or a corresponding mutation in another TadA.

[0563] In other embodiments, a base editor of the disclosure comprising an adenosine deaminase variant (e.g., TadA*8) monomer comprising one or more of the following alterations: R26C, V88A, A109S, T111R, D119N, H122N, Y147D, F149Y, T166I and/or D167N, relative to TadA*7.10, the TadA reference sequence, or a corresponding mutation in another TadA. In other embodiments, the adenosine deaminase variant (TadA*8) monomer comprises a combination of alterations selected from the group of: R26C+A109S+T111R+D119N+H122N+Y147D+F149Y+T1661+D167N; V88A+A109S+T111R+D119N+H122N+F149Y+T1661+D167N; R26C+A109S+T111R+D119N+H122N+F149Y+T1661+D167N; V88A+T111R+D119N+F149Y; and A109S+T111R+D119N+H122N+Y147D+F149Y+T166I+D167N, relative to TadA*7.10, the TadA reference sequence, or a corresponding mutation in another TadA.

[0564] In some embodiments, an adenosine deaminase variant (e.g., MSP828) is a monomer comprising one or more of the following alterations L36H, I76Y, V82G, Y147T, Y147D, F149Y, Q154S, N157K, and/or D167N, relative to TadA*7.10, the TadA reference sequence, or a corresponding mutation in another TadA. In some embodiments, an adenosine deaminase variant (e.g., MSP828) is a monomer comprising V82G, Y147T/D, Q154S, and one or more of L36H, I76Y, F149Y, N157K, and D167N, relative to TadA*7.10, the TadA reference sequence, or a corresponding mutation in another TadA. In other embodiments, the adenosine deaminase variant (TadA variant) is a monomer comprising a combination of alterations selected from the group of: V82G+Y147T+Q154S; I76Y+V82G+Y147T+Q154S; L36H+V82G+Y147T+Q154S+N157K; V82G+Y147D+F149Y+Q154S+D167N; L36H+V82G+Y147D+F149Y+Q154S+N157K+D167N; L36H+I76Y+V82G+Y147T+Q154S+N157K; I76Y+V82G+Y147D+F149Y+Q154S+D167N; L36H+I76Y+V82G+Y147D+F149Y+Q154S+N157K+D167N, relative to TadA*7.10, the TadA reference sequence, or a corresponding mutation in another TadA.

[0565] In other embodiments, the adenosine deaminase variant is a heterodimer of a wild-type adenosine deaminase domain and an adenosine deaminase variant domain (e.g., TadA*8) comprising one or more of the following alterations Y147T, Y147R, Q154S, Y123H, V82S, T166R, and/or Q154R, relative to TadA*7.10, the TadA reference sequence, or a corresponding mutation in another TadA. In other embodiments, the adenosine deaminase variant is a heterodimer of a wild-type adenosine deaminase domain and an adenosine deaminase variant domain (e.g., TadA*8) comprising a combination of alterations selected from the group of: Y147T+Q154R; Y147T+Q154S; Y147R+Q154S; V82S+Q154S; V82S+Y147R; V82S+Q154R; V82S+Y123H; I76Y+V82S; V82S+Y123H+Y147T; V82S+Y123H+Y147R; V82S+Y123H+Q154R; Y147R+Q154R+Y123H; Y147R+Q154R+I76Y; Y147R+Q154R+T166R; Y123H+Y147R+Q154R+I76Y; V82S+Y123H+Y147R+Q154R; and I76Y+V82S+Y123H+Y147R+Q154R, relative to TadA*7.10, the TadA reference sequence, or a corresponding mutation in another TadA.

[0566] In other embodiments, a base editor of the disclosure comprising an adenosine deaminase variant (e.g., TadA*8) homodimer comprising two adenosine deaminase domains (e.g., TadA*8) each having one or more of the following alterations R26C, V88A, A109S, T111R, D119N, H122N, Y147D, F149Y, T166I and/or D167N, relative to TadA*7.10, the TadA reference sequence, or a corresponding mutation in another TadA. In other embodiments, the adenosine deaminase variant is a homodimer comprising two adenosine deaminase domains (e.g., TadA*8) each having a combination of alterations selected from the group of: R26C+A109S+T111R+D119N+H122N+Y147D+F149Y+T166I+D167N; V88A+A109S+T111R+Dl19N+H122N+F149Y+T1661+D167N; R26C+A109S+T111R+D119N+H122N+F149Y+T166I+D167N; V88A+T111R+D119N+F149Y; and A109S+T111R+D119N+H122N+Y147D+F149Y+T166I+D167N, relative to TadA*7.10, the TadA reference sequence, or a corresponding mutation in another TadA.

[0567] In some embodiments, an adenosine deaminase variant is a homodimer comprising two adenosine deaminase domains (e.g., TadA*7.10) each having one or more of the following alterations L36H, I76Y, V82G, Y147T, Y147D, F149Y, Q154S, N157K, and/or D167N, relative to TadA*7.10, the TadA reference sequence, or a corresponding mutation in another TadA. In some embodiments, an adenosine deaminase variant is a homodimer comprising two adenosine deaminase variant domains (e.g., MSP828) each having the following alterations V82G, Y147T/D, Q154S, and one or more of L36H, I76Y, F149Y, N157K, and D167N, relative to TadA*7.10, the TadA reference sequence, or a corresponding mutation in another TadA. In other embodiments, the adenosine deaminase variant is a homodimer comprising two adenosine deaminase domains (e.g., TadA*7.10) each having a combination of alterations selected from the group of: V82G+Y147T+Q154S; I76Y+V82G+Y147T+Q154S; L36H+V82G+Y147T+Q154S+N157K; V82G+Y147D+F149Y+Q154S+D167N; L36H+V82G+Y147D+F149Y+Q154S+N157K+D167N; L36H+I76Y+V82G+Y147T+Q154S+N157K; I76Y+V82G+Y147D+F149Y+Q154S+D167N; L36H+I76Y+V82G+Y147D+F149Y+Q154S+N157K+D167N, relative to TadA*7.10, the TadA reference sequence, or a corresponding mutation in another TadA.

[0568] In other embodiments, the adenosine deaminase variant is a heterodimer of a TadA*7.10 domain and an adenosine deaminase variant domain (e.g., TadA*8) comprising one or more of the following alterations Y147T, Y147R, Q154S, Y123H, V82S, T166R, and/or Q154R, relative to TadA*7.10, the TadA reference sequence, or a corresponding mutation in another TadA. In other embodiments, the adenosine deaminase variant is a heterodimer of a TadA*7.10 domain and an adenosine deaminase variant domain (e.g., TadA*8) comprising a combination of alterations selected from the group of: Y147T+Q154R; Y147T+Q154S; Y147R+Q154S; V82S+Q154S; V82S+Y147R; V82S+Q154R; V82S+Y123H; I76Y+V82S; V82S+Y123H+Y147T; V82S+Y123H+Y147R; V82S+Y123H+Q154R; Y147R+Q154R+Y123H; Y147R+Q154R+I76Y; Y147R+Q154R+T166R; Y123H+Y147R+Q154R+I76Y; V82S+Y123H+Y147R+Q154R; and I76Y+V82S+Y123H+Y147R+Q154R, relative to TadA*7.10, the TadA reference sequence, or a corresponding mutation in another TadA.

[0569] In other embodiments, a base editor comprises a heterodimer of a wild-type adenosine deaminase domain and an adenosine deaminase variant domain (e.g., TadA*8) comprising one or more of the following alterations R26C, V88A, A109S, T111R, D119N, H122N, Y147D, F149Y, T166I and/or D167N, relative to TadA*7.10, the TadA reference sequence, or a corresponding mutation in another TadA. In other embodiments, the base editor comprises a heterodimer of a wild-type adenosine deaminase domain and an adenosine deaminase variant domain (e.g., TadA*8) comprising a combination of alterations selected from the group of: R26C+A109S+T111R+D119N+H122N+Y147D+F149Y+T166I+D167N; V88A+A109S+T111R+D119N+H122N+F149Y+T166I+D167N; R26C+A109S+T111R+D119N+H122N+F149Y+T166I+D167N; V88A+T111R+D119N+F149Y; and A109S+T111R+D119N+H122N+Y147D+F149Y+T166I+D167N, relative to TadA*7.10, the TadA reference sequence, or a corresponding mutation in another TadA.

[0570] In other embodiments, the adenosine deaminase variant is a heterodimer of a wild-type adenosine deaminase domain and an adenosine deaminase variant domain (e.g., TadA*7.10) comprising one or more of the following alterations L36H, I76Y, V82G, Y147T, Y147D, F149Y, Q154S, N157K, and/or D167N, relative to TadA*7.10, the TadA reference sequence, or a corresponding mutation in another TadA. In some embodiments, an adenosine deaminase variant is a heterodimer comprising a wild-type adenosine deaminase domain and an adenosine deaminase variant domain (e.g., MSP828) having the following alterations V82G, Y147T/D, Q154S, and one or more of L36H, I76Y, F149Y, N157K, and D167N, relative to TadA*7.10, the TadA reference sequence, or a corresponding mutation in another TadA. In other embodiments, the adenosine deaminase variant is a heterodimer of a wild-type adenosine deaminase domain and an adenosine deaminase variant domain (e.g., TadA*7.10) comprising a combination of alterations selected from the group of: V82G+Y147T+Q154S; I76Y+V82G+Y147T+Q154S; L36H+V82G+Y147T+Q154S+N157K; V82G+Y147D+F149Y+Q154S+D167N; L36H+V82G+Y147D+F149Y+Q154S+N157K+D167N; L36H+I76Y+V82G+Y147T+Q154S+N157K; I76Y+V82G+Y147D+F149Y+Q154S+D167N; L36H+I76Y+V82G+Y147D+F149Y+Q154S+N157K+D167N, relative to TadA*7.10, the TadA reference sequence, or a corresponding mutation in another TadA.

[0571] In other embodiments, the adenosine deaminase variant is a heterodimer of a TadA*7.10 domain and an adenosine deaminase variant domain (e.g., TadA*8) comprising one or more of the following alterations Y147T, Y147R, Q154S, Y123H, V82S, T166R, and/or Q154R, relative to TadA*7.10, the TadA reference sequence, or a corresponding mutation in another TadA. In other embodiments, the adenosine deaminase variant is a heterodimer of a TadA*7.10 domain and an adenosine deaminase variant domain (e.g., TadA*8) comprising a combination of alterations selected from the group of: Y147T+Q154R; Y147T+Q154S; Y147R+Q154S; V82S+Q154S; V82S+Y147R; V82S+Q154R; V82S+Y123H; I76Y+V82S; V82S+Y123H+Y147T; V82S+Y123H+Y147R; V82S+Y123H+Q154R; Y147R+Q154R+Y123H; Y147R+Q154R+I76Y; Y147R+Q154R+T166R; Y123H+Y147R+Q154R+I76Y; V82S+Y123H+Y147R+Q154R; and I76Y+V82S+Y123H+Y147R+Q154R, relative to TadA*7.10, the TadA reference sequence, or a corresponding mutation in another TadA.

[0572] In particular embodiments, an adenosine deaminase heterodimer comprises a TadA*8 domain and an adenosine deaminase domain selected from Staphylococcus aureus (S. aureus) TadA, Bacillus subtilis (B. subtilis) TadA, Salmonella typhimurium (S. typhimurium) TadA, Shewanella putrefaciens (S. putrefaciens) TadA, Haemophilus influenzae F3031 (H. influenzae) TadA, Caulobacter crescentus (C. crescentus) TadA, Geobacter sulfurreducens (G. sulfurreducens) TadA, or TadA*7.10.

[0573] In some embodiments, an adenosine deaminase is a TadA*8. In one embodiment, an adenosine deaminase is a TadA*8 that comprises or consists essentially of the following sequence or a fragment thereof having adenosine deaminase activity: MSEVEFSHEYWMRHALTLAKRARDEREVPVGAVLVLNNRVIGEGWNRAIGLHDPTAHAEIMALR QGGLVMQNYRLIDATLYVTFEPCVMCAGAMIHSRIGRVVFGVRNAKTGAAGSLMDVLHYPGMNH RVEITEGILADECAALLCTFFRMPRQVFNAQKKAQSSTD (SEQ ID NO: 316)

[0574] In some embodiments, the TadA*8 is truncated. In some embodiments, the truncated TadA*8 is missing 1, 2, 3, 4, 5, 6, 7, 8, 9, 10, 11, 12, 13, 14, 15, 6, 17, 18, 19, or 20 N-terminal amino acid residues relative to the full length TadA*8. In some embodiments, the truncated TadA*8 is missing 1, 2, 3, 4, 5, 6, 7, 8, 9, 10, 11, 12, 13, 14, 15, 6, 17, 18, 19, or 20 C-terminal amino acid residues relative to the full length TadA*8. In some embodiments the adenosine deaminase variant is a full-length TadA*8.

[0575] In some embodiments the TadA*8 is TadA*8.1, TadA*8.2, TadA*8.3, TadA*8.4, TadA*8.5, TadA*8.6, TadA*8.7, TadA*8.8, TadA*8.9, TadA*8.10, TadA*8.11, TadA*8.12, TadA*8.13, TadA*8.14, TadA*8.15, TadA*8.16, TadA*8.17, TadA*8.18, TadA*8.19, TadA*8.20, TadA*8.21, TadA*8.22, TadA*8.23, or TadA*8.24.

[0576] In other embodiments, a base editor of the disclosure comprising an adenosine deaminase variant (e.g., TadA*8) monomer comprising one or more of the following alterations: R26C, V88A, A109S, T111R, D119N, H122N, Y147D, F149Y, T166I and/or D167N, relative to TadA*7.10, the TadA reference sequence, or a corresponding mutation in another TadA. In other embodiments, the adenosine deaminase variant (TadA*8) monomer comprises a combination of alterations selected from the group of: R26C+A109S+Ti 11R+D119N+H122N+Y147D+F149Y+T1661+D167N; V88A+A109S+T111R+D119N+H122N+F149Y+T1661+D167N; R26C+A109S+T111R+D119N+H122N+F149Y+T1661+D167N; V88A+T111R+D119N+F149Y; and A109S+T111R+D119N+H122N+Y147D+F149Y+T1661+D167N, relative to TadA*7.10, the TadA reference sequence, or a corresponding mutation in another TadA.

[0577] In other embodiments, a base editor comprises a heterodimer of a wild-type adenosine deaminase domain and an adenosine deaminase variant domain (e.g., TadA*8) comprising one or more of the following alterations R26C, V88A, A109S, T111R, D119N, H122N, Y147D, F149Y, T166I and/or D167N, relative to TadA*7.10, the TadA reference sequence, or a corresponding mutation in another TadA. In other embodiments, the base editor comprises a heterodimer of a wild-type adenosine deaminase domain and an adenosine deaminase variant domain (e.g., TadA*8) comprising a combination of alterations selected from the group of: R26C+A109S+T111R+D119N+H122N+Y147D+F149Y+T166I+D167N; V88A+A109S+T111R+D119N+H122N+F149Y+T1661+D167N; R26C+A109S+T111R+D119N+H122N+F149Y+T166I+D167N; V88A+T111R+D119N+F149Y; and A109S+T111R+D119N+H122N+Y147D+F149Y+T1661+D167N, relative to TadA*7.10, the TadA reference sequence, or a corresponding mutation in another TadA.

[0578] In other embodiments, a base editor comprises a heterodimer of a TadA*7.10 domain and an adenosine deaminase variant domain (e.g., TadA*8) comprising one or more of the following alterations R26C, V88A, A109S, T111R, D119N, H122N, Y147D, F149Y, T166I and/or D167N, relative to TadA*7.10, the TadA reference sequence, or a corresponding mutation in another TadA. In other embodiments, the base editor comprises a heterodimer of a TadA*7.10 domain and an adenosine deaminase variant domain (e.g., TadA*8) comprising a combination of alterations selected from the group of: R26C+A109S+Ti 11R+D119N+H122N+Y147D+F149Y+T1661+D167N; V88A+A109S+T111R+D119N+H122N+F149Y+T1661+D167N; R26C+A109S+T111R+D119N+H122N+F149Y+T166I+D167N; V88A+T111R+D119N+F149Y; and A109S+T111R+D119N+H122N+Y147D+F149Y+T166I+D167N, relative to TadA*7.10, the TadA reference sequence, or a corresponding mutation in another TadA.

[0579] In other embodiments, the adenosine deaminase variant is a heterodimer of a TadA*7.10 domain and an adenosine deaminase variant domain (e.g., TadA*7.10) comprising one or more of the following alterations L36H, I76Y, V82G, Y147T, Y147D, F149Y, Q154S, N157K, and/or D167N, relative to TadA*7.10, the TadA reference sequence, or a corresponding mutation in another TadA. In some embodiments, an adenosine deaminase variant is a heterodimer comprising a TadA*7.10 domain and an adenosine deaminase variant domain (e.g., MSP828) having the following alterations V82G, Y147T/D, Q154S, and one or more of L36H, I76Y, F149Y, N157K, and D167N, relative to TadA*7.10, the TadA reference sequence, or a corresponding mutation in another TadA. In other embodiments, the adenosine deaminase variant is a heterodimer of a TadA*7.10 domain and an adenosine deaminase variant domain (e.g., TadA*7.10) comprising a combination of alterations selected from the group of: V82G+Y147T+Q154S; I76Y+V82G+Y147T+Q154S; L36H+V82G+Y147T+Q154S+N157K; V82G+Y147D+F149Y+Q154S+D167N; L36H+V82G+Y147D+F149Y+Q154S+N157K+D167N; L36H+I76Y+V82G+Y147T+Q154S+N157K; I76Y+V82G+Y147D+F149Y+Q154S+D167N; L36H+I76Y+V82G+Y147D+F149Y+Q154S+N157K+D167N, relative to TadA*7.10, the TadA reference sequence, or a corresponding mutation in another TadA.

[0580] In some embodiments, the TadA*8 is a variant as shown in Table 6. Table 6 shows certain amino acid position numbers in the TadA amino acid sequence and the amino acids present in those positions in the TadA-7.10 adenosine deaminase. Table 6 also shows amino acid changes in TadA variants relative to TadA-7.10 following phage-assisted non-continuous evolution (PANCE) and phage-assisted continuous evolution (PACE), as described in M. Richter et al., 2020, Nature Biotechnology, doi.org/10.1038/s41587-020-0453-z, the entire contents of which are incorporated by reference herein. In some embodiments, the TadA*8 is TadA*8a, TadA*8b, TadA*8c, TadA*8d, or TadA*8e. In some embodiments, the TadA*8 is TadA*8e.

TABLE 6
Select TadA*8 Variants

| | | TadA amino acid number | | | | | | | | | |
|---|---|---|---|---|---|---|---|---|---|---|---|
| | TadA | 26 | 88 | 109 | 111 | 119 | 122 | 147 | 149 | 166 | 167 |
| | TadA-7.10 | R | V | A | T | D | H | Y | F | T | D |
| PANCE 1 | | | | | R | | | | | | |
| PANCE 2 | | | | S/T | R | | | | | | |
| PACE | TadA-8a | C | | S | R | N | N | D | Y | I | N |
| | TadA-8b | | A | S | R | N | N | | Y | I | N |
| | TadA-8c | C | | S | R | N | N | | Y | I | N |
| | TadA-8d | | A | | R | N | | | Y | | |
| | TadA-8e | | | S | R | N | N | D | Y | I | N |

In some embodiments, the TadA variant is a variant as shown in Table 6.1. Table 6.1 shows certain amino acid position numbers in the TadA amino acid sequence and the amino acids present in those positions in the TadA*7.10 adenosine deaminase. In some embodiments, the TadA variant is MSP605, MSP680, MSP823, MSP824, MSP825, MSP827, MSP828, or MSP829. In some embodiments, the TadA variant is MSP828. In some embodiments, the TadA variant is MSP829.

TABLE 6.1
TadA Variants

| | TadA Amino Acid Number | | | | | | | |
|---|---|---|---|---|---|---|---|---|
| Variant | 36 | 76 | 82 | 147 | 149 | 154 | 157 | 167 |
| TadA-7.10 | L | I | V | Y | F | Q | N | D |
| MSP605 | | | G | T | | S | | |
| MSP680 | | Y | G | T | | S | | |
| MSP823 | H | | G | T | | S | K | |
| MSP824 | | | G | D | Y | S | | N |
| MSP825 | H | | G | D | Y | S | K | N |
| MSP827 | H | Y | G | T | | S | K | |
| MSP828 | | Y | G | D | Y | S | | N |
| MSP829 | H | Y | G | D | Y | S | K | N |

[0581] In one embodiment, a fusion protein of the invention comprises a wild-type TadA is linked to an adenosine deaminase variant described herein (e.g., TadA*8), which is linked to Cas9 nickase. In particular embodiments, the fusion proteins comprise a single TadA*8 domain (e.g., provided as a monomer). In other embodiments, the fusion protein comprises TadA*8 and TadA(wt), which are capable of forming heterodimers.

[0582] In some embodiments, the adenosine deaminase comprises an amino acid sequence that is at least 60%, at least 65%, at least 70%, at least 75%, at least 80%, at least 85%, at least 90%, at least 95%, at least 96%, at least 97%, at least 98%, at least 99%, or at least 99.5% identical to any one of the amino acid sequences set forth in any of the adenosine deaminases provided herein. It should be appreciated that adenosine deaminases provided herein may include one or more mutations (e.g., any of the mutations provided herein). The disclosure provides any deaminase domains with a certain percent identity plus any of the mutations or combinations thereof described herein. In some embodiments, the adenosine deaminase comprises an amino acid sequence that has 1, 2, 3, 4, 5, 6, 7, 8, 9, 10, 11, 12, 13, 14, 15, 16, 17, 18, 19, 20, 21, 22, 21, 24, 25, 26, 27, 28, 29, 30, 31, 32, 33, 34, 35, 36, 37, 38, 39, 40, 41, 42, 43, 44, 45, 46, 47, 48, 49, 50, or more mutations compared to a reference sequence, or any of the adenosine deaminases provided herein. In some embodiments, the adenosine deaminase comprises an amino acid sequence that has at least 5, at least 10, at least 15, at least 20, at least 25, at least 30, at least 35, at least 40, at least 45, at least 50, at least 60, at least 70, at least 80, at least 90, at least 100, at least 110, at least 120, at least 130, at least 140, at least 150, at least 160, or at least 170 identical contiguous amino acid residues as compared to any one of the amino acid sequences known in the art or described herein.

[0583] In particular embodiments, a TadA*8 comprises one or more mutations at any of the following positions shown in bold. In other embodiments, a TadA*8 comprises one or more mutations at any of the positions shown with underlining:

| (SEQ ID NO: 1) | |
|---|---|
| MSEVEFSHEY WMRHALTLAK RARDEREVPV GAVLVLNNRV IGEGWNRAIG | 50 |
| LHDPTAHAEI MALRQGGLVM QNYRLIDATL YVTFEPCVMC AGAMIHSRIG | 100 |
| RVVFGVRNAK TGAAGSLMDV LHYPGMNHRV EITEGILADE CAALLCYFFR | 150 |
| MPRQVFNAQK KAQSSTD | |

[0584] For example, the TadA*8 comprises alterations at amino acid position 82 and/or 166 (e.g., V82S, T166R) alone or in combination with any one or more of the following Y147T, Y147R, Q154S, Y123H, and/or Q154R, relative to TadA*7.10, the TadA reference sequence, or a corresponding mutation in another TadA. In particular embodiments, a combination of alterations is selected from the group of: Y147T+Q154R; Y147T+Q154S; Y147R+Q154S; V82S+Q154S; V82S+Y147R; V82S+Q154R; V82S+Y123H; I76Y+V82S; V82S+Y123H+Y147T; V82S+Y123H+Y147R; V82S+Y123H+Q154R; Y147R+Q154R+Y123H; Y147R+Q154R+I76Y; Y147R+Q154R+T166R; Y123H+Y147R+Q154R+I76Y; V82S+Y123H+Y147R+Q154R; and I76Y+V82S+Y123H+Y147R+Q154R, relative to TadA*7.10, the TadA reference sequence, or a corresponding mutation in another TadA.

[0585] In some embodiments, the TadA*8 is truncated. In some embodiments, the truncated TadA*8 is missing 1, 2, 3, 4, 5, 6, 7, 8, 9, 10, 11, 12, 13, 14, 15, 6, 17, 18, 19, or 20 N-terminal amino acid residues relative to the full length TadA*8. In some embodiments, the truncated TadA*8 is missing 1, 2, 3, 4, 5, 6, 7, 8, 9, 10, 11, 12, 13, 14, 15, 6, 17, 18, 19, or 20 C-terminal amino acid residues relative to the full length TadA*8. In some embodiments the adenosine deaminase variant is a full-length TadA*8.

[0586] In one embodiment, a fusion protein of the invention comprises a wild-type TadA is linked to an adenosine deaminase variant described herein (e.g., TadA*8), which is linked to Cas9 nickase. In particular embodiments, the fusion proteins comprise a single TadA*8 domain (e.g., provided as a monomer). In other embodiments, the base editor comprises TadA*8 and TadA(wt), which are capable of forming heterodimers.

[0587] In particular embodiments, the fusion proteins comprise a single (e.g., provided as a monomer) TadA*8. In some embodiments, the TadA*8 is linked to a Cas9 nickase. In some embodiments, the fusion proteins of the invention comprise as a heterodimer of a wild-type TadA (TadA(wt)) linked to a TadA*8. In other embodiments, the fusion proteins of the invention comprise as a heterodimer of a TadA*7.10 linked to a TadA*8. In some embodiments, the base editor is ABE8 comprising a TadA*8 variant monomer. In some embodiments, the base editor is ABE8 comprising a heterodimer of a TadA*8 and a TadA(wt). In some embodiments, the base editor is ABE8 comprising a heterodimer of a TadA*8 and TadA*7.10. In some embodiments, the base editor is ABE8 comprising a heterodimer of a TadA*8. In some embodiments, the TadA*8 is selected from Table 6, 12, or 13. In some embodiments, the ABE8 is selected from Table 12, 13, or 15.

[0588] In some embodiments, the adenosine deaminase is a TadA*9 variant. In some embodiments, the adenosine deaminase is a TadA*9 variant selected from the variants described below and with reference to the following sequence (termed TadA*7.10):

(SEQ ID NO: 1)
MSEVEFSHEY WMRHALTLAK RARDEREVPV GAVLVLNNRV
IGEGWNRAIG LHDPTAHAEI MALRQGGLVM QNYRLIDATL
YVTFEPCVMC AGAMIHSRIG RVVFGVRNAK TGAAGSLMDV
LHYPGMNHRV EITEGILADE CAALLCYFFR MPRQVFNAQK
KAQSSTD

[0589] In some embodiments, an adenosine deaminase comprises one or more of the following alterations: R21N, R23H, E25F, N38G, L51W, P54C, M70V, Q71M, N72K, Y73S, V82T, M94V, P124W, T133K, D139L, D139M, C146R, and A158K. The one or more alternations are shown in the sequence above in underlining and bold font.

[0590] In some embodiments, an adenosine deaminase comprises one or more of the following combinations of alterations: V82S+Q154R+Y147R; V82S+Q154R+Y123H; V82S+Q154R+Y147R+Y123H; Q154R+Y147R+Y123H+I76Y+V82S; V82S+I76Y; V82S+Y147R; V82S+Y147R+Y123H; V82S+Q154R+Y123H; Q154R+Y147R+Y123H+I76Y; V82S+Y147R; V82S+Y147R+Y123H; V82S+Q154R+Y123H; V82S+Q154R+Y147R; V82S+Q154R+Y147R; Q154R+Y147R+Y123H+176Y; Q154R+Y147R+Y123H+I76Y+V82S; I76Y_V82S_Y123H_Y147R_Q154R; Y147R+Q154R+H123H; and V82S+Q154R.

[0591] In some embodiments, an adenosine deaminase comprises one or more of the following combinations of alterations: E25F+V82S+Y123H, T133K+Y147R+Q154R; E25F+V82S+Y123H+Y147R+Q154R; L51W+V82S+Y123H+C146R+Y147R+Q154R; Y73S+V82S+Y123H+Y147R+Q154R; P54C+V82S+Y123H+Y147R+Q154R; N38G+V82T+Y123H+Y147R+Q154R; N72K+V82S+Y123H+D139L+Y147R+Q154R; E25F+V82S+Y123H+D139M+Y147R+Q154R; Q71M+V82S+Y123H+Y147R+Q154R; E25F+V82S+Y123H+T133K+Y147R+Q154R; E25F+V82S+Y123H+Y147R+Q154R; V82S+Y123H+P124W+Y147R+Q154R; L51W+V82S+Y123H+C146R+Y147R+Q154R; P54C+V82S+Y123H+Y147R+Q154R; Y73S+V82S+Y123H+Y147R+Q154R; N38G+V82T+Y123H+Y147R+Q154R; R23H+V82S+Y123H+Y147R+Q154R; R21N+V82S+Y123H+Y147R+Q154R; V82S+Y123H+Y147R+Q154R+A158K; N72K+V82S+Y123H+D139L+Y147R+Q154R; E25F+V82S+Y123H+D139M+Y147R+Q154R; and M70V+V82S+M94V+Y123H+Y147R+Q154R

[0592] In some embodiments, an adenosine deaminase comprises one or more of the following combinations of alterations: Q71M+V82S+Y123H+Y147R+Q154R; E25F+I76Y+V82S+Y123H+Y147R+Q154R; I76Y+V82T+Y123H+Y147R+Q154R; N38G+I76Y+V82S+Y123H+Y147R+Q154R; R23H+I76Y+V82S+Y123H+Y147R+Q154R; P54C+I76Y+V82S+Y123H+Y147R+Q154R; R21N+I76Y+V82S+Y123H+Y147R+Q154R; I76Y+V82S+Y123H+D139M+Y147R+Q154R; Y73S+I76Y+V82S+Y123H+Y147R+Q154R; E25F+I76Y+V82S+Y123H+Y147R+Q154R; I76Y+V82T+Y123H+Y147R+Q154R; N38G+I76Y+V82S+Y123H+Y147R+Q154R; R23H+I76Y+V82S+Y123H+Y147R+Q154R; P54C+I76Y+V82S+Y123H+Y147R+Q154R; R21N+I76Y+V82S+Y123H+Y147R+Q154R; I76Y+V82S+Y123H+D139M+Y147R+Q154R; Y73 S+I76Y+V82S+Y123H+Y147R+Q154R; and V82S+Q154R; N72K_V82S+Y123H+Y147R+Q154R; Q71M_V82S+Y123H+Y147R+Q154R; V82S+Y123H+T133K+Y147R+Q154R; V82S+Y123H+T133K+Y147R+Q154R+A158K; M70V+Q71M+N72K+V82S+Y123H+Y147R+Q154R; N72K_V82S+Y123H+Y147R+Q154R; Q71M_V82S+Y123H+Y147R+Q154R; M70V+V82S+M94V+Y123H+Y147R+Q154R; V82S+Y123H+T133K+Y147R+Q154R; V82S+Y123H+T133K+Y147R+Q154R+A158K; and M70V+Q71M+N72K+V82S+Y123H+Y147R+Q154R. In some embodiments, the adenosine deaminase is expressed as a monomer. In other embodiments, the adenosine deaminase is expressed as a heterodimer. In some embodiments, the deaminase or other polypeptide sequence lacks a methionine, for example when included as a component of a fusion protein. This can alter the numbering of positions. However, the skilled person will understand that such corresponding mutations refer to the same mutation, e.g., Y73S and Y72S and D139M and D138M.

[0593] In some embodiments, the TadA*9 variant comprises the alterations described in Table 16 as described herein. In some embodiments, the TadA*9 variant is a monomer. In some embodiments, the TadA*9 variant is a heterodimer with a wild-type TadA adenosine deaminase. In some embodiments, the TadA*9 variant is a heterodimer with another TadA variant (e.g., TadA*8, TadA*9). Additional details of TadA*9 adenosine deaminases are described in International PCT Application No. PCT/2020/049975, which is incorporated herein by reference for its entirety.

[0594] Any of the mutations provided herein and any additional mutations (e.g., based on the ecTadA amino acid sequence) can be introduced into any other adenosine deaminases. Any of the mutations provided herein can be made individually or in any combination in TadA reference sequence or another adenosine deaminase (e.g., ecTadA).

[0595] Details of A to G nucleobase editing proteins are described in International PCT Application No. PCT/2017/045381 (WO2018/027078) and Gaudelli, N. M., et al., “Programmable base editing of A·T to G·C in genomic DNA without DNA cleavage” Nature, 551, 464-471 (2017), the entire contents of which are hereby incorporated by reference.

### C to T Editing

[0596] In some embodiments, a base editor disclosed herein comprises a fusion protein comprising cytidine deaminase capable of deaminating a target cytidine (C) base of a polynucleotide to produce uridine (U), which has the base pairing properties of thymine. In some embodiments, for example where the polynucleotide is double-stranded (e.g., DNA), the uridine base can then be substituted with a thymidine base (e.g., by cellular repair machinery) to give rise to a C:G to a T:A transition. In other embodiments, deamination of a C to U in a nucleic acid by a base editor cannot be accompanied by substitution of the U to a T.

[0597] The deamination of a target C in a polynucleotide to give rise to a U is a non-limiting example of a type of base editing that can be executed by a base editor described herein. In another example, a base editor comprising a cytidine deaminase domain can mediate conversion of a cytosine (C) base to a guanine (G) base. For example, a U of a polynucleotide produced by deamination of a cytidine by a cytidine deaminase domain of a base editor can be excised from the polynucleotide by a base excision repair mechanism (e.g., by a uracil DNA glycosylase (UDG) domain), producing an abasic site. The nucleobase opposite the abasic site can then be substituted (e.g., by base repair machinery) with another base, such as a C, by for example a translesion polymerase. Although it is typical for a nucleobase opposite an abasic site to be replaced with a C, other substitutions (e.g., A, G or T) can also occur.

[0598] Accordingly, in some embodiments a base editor described herein comprises a deamination domain (e.g., cytidine deaminase domain) capable of deaminating a target C to a U in a polynucleotide. Further, as described below, the base editor can comprise additional domains which facilitate conversion of the U resulting from deamination to, in some embodiments, a T or a G. For example, a base editor comprising a cytidine deaminase domain can further comprise a uracil glycosylase inhibitor (UGI) domain to mediate substitution of a U by a T, completing a C-to-T base editing event. In another example, a base editor can incorporate a translesion polymerase to improve the efficiency of C-to-G base editing, since a translesion polymerase can facilitate incorporation of a C opposite an abasic site (i.e., resulting in incorporation of a G at the abasic site, completing the C-to-G base editing event).

[0599] A base editor comprising a cytidine deaminase as a domain can deaminate a target C in any polynucleotide, including DNA, RNA and DNA-RNA hybrids. Typically, a cytidine deaminase catalyzes a C nucleobase that is positioned in the context of a single-stranded portion of a polynucleotide. In some embodiments, the entire polynucleotide comprising a target C can be single-stranded. For example, a cytidine deaminase incorporated into the base editor can deaminate a target C in a single-stranded RNA polynucleotide. In other embodiments, a base editor comprising a cytidine deaminase domain can act on a double-stranded polynucleotide, but the target C can be positioned in a portion of the polynucleotide which at the time of the deamination reaction is in a single-stranded state. For example, in embodiments where the NAGPB domain comprises a Cas9 domain, several nucleotides can be left unpaired during formation of the Cas9-gRNA-target DNA complex, resulting in formation of a Cas9 “R-loop complex”. These unpaired nucleotides can form a bubble of single-stranded DNA that can serve as a substrate for a single-strand specific nucleotide deaminase enzyme (e.g., cytidine deaminase).

[0600] In some embodiments, a cytidine deaminase of a base editor can comprise all or a portion of an apolipoprotein B mRNA editing complex (APOBEC) family deaminase. APOBEC is a family of evolutionarily conserved cytidine deaminases. Members of this family are C-to-U editing enzymes. The N-terminal domain of APOBEC like proteins is the catalytic domain, while the C-terminal domain is a pseudocatalytic domain. More specifically, the catalytic domain is a zinc dependent cytidine deaminase domain and is important for cytidine deamination. APOBEC family members include APOBEC1, APOBEC2, APOBEC3A, APOBEC3B, APOBEC3C, APOBEC3D (“APOBEC3E” now refers to this), APOBEC3F, APOBEC3G, APOBEC3H, APOBEC4, and Activation-induced (cytidine) deaminase. In some embodiments, a deaminase incorporated into a base editor comprises all or a portion of an APOBEC1 deaminase. In some embodiments, a deaminase incorporated into a base editor comprises all or a portion of APOBEC2 deaminase. In some embodiments, a deaminase incorporated into a base editor comprises all or a portion of is an APOBEC3 deaminase. In some embodiments, a deaminase incorporated into a base editor comprises all or a portion of an APOBEC3A deaminase. In some embodiments, a deaminase incorporated into a base editor comprises all or a portion of APOBEC3B deaminase. In some embodiments, a deaminase incorporated into a base editor comprises all or a portion of APOBEC3C deaminase. In some embodiments, a deaminase incorporated into a base editor comprises all or a portion of APOBEC3D deaminase. In some embodiments, a deaminase incorporated into a base editor comprises all or a portion of APOBEC3E deaminase. In some embodiments, a deaminase incorporated into a base editor comprises all or a portion of APOBEC3F deaminase. In some embodiments, a deaminase incorporated into a base editor comprises all or a portion of APOBEC3G deaminase. In some embodiments, a deaminase incorporated into a base editor comprises all or a portion of APOBEC3H deaminase. In some embodiments, a deaminase incorporated into a base editor comprises all or a portion of APOBEC4 deaminase. In some embodiments, a deaminase incorporated into a base editor comprises all or a portion of activation-induced deaminase (AID). In some embodiments a deaminase incorporated into a base editor comprises all or a portion of cytidine deaminase 1 (CDA1). It should be appreciated that a base editor can comprise a deaminase from any suitable organism (e.g., a human or a rat). In some embodiments, a deaminase domain of a base editor is from a human, chimpanzee, gorilla, monkey, cow, dog, rat, or mouse. In some embodiments, the deaminase domain of the base editor is derived from rat (e.g., rat APOBEC1). In some embodiments, the deaminase domain of the base editor is human APOBEC1. In some embodiments, the deaminase domain of the base editor is pmCDA1.

[0601] Other exemplary deaminases that can be fused to Cas9 according to aspects of this disclosure are provided below. In embodiments, the deaminases are activation-induced deaminases (AID). It should be understood that, in some embodiments, the active domain of the respective sequence can be used, e.g., the domain without a localizing signal (nuclear localization sequence, without nuclear export signal, cytoplasmic localizing signal).

[0602] Some aspects of the present disclosure are based on the recognition that modulating the deaminase domain catalytic activity of any of the fusion proteins described herein, for example by making point mutations in the deaminase domain, affect the processivity of the fusion proteins (e.g., base editors). For example, mutations that reduce, but do not eliminate, the catalytic activity of a deaminase domain within a base editing fusion protein can make it less likely that the deaminase domain will catalyze the deamination of a residue adjacent to a target residue, thereby narrowing the deamination window. The ability to narrow the deamination window can prevent unwanted deamination of residues adjacent to specific target residues, which can decrease or prevent off-target effects.

[0603] For example, in some embodiments, an APOBEC deaminase incorporated into a base editor can comprise one or more mutations selected from the group consisting of H121X, H122X, R126X, R126X, R118X, W90X, W90X, and R132X of rAPOBEC1, or one or more corresponding mutations in another APOBEC deaminase, wherein X is any amino acid. In some embodiments, an APOBEC deaminase incorporated into a base editor can comprise one or more mutations selected from the group consisting of H121R, H122R, R126A, R126E, R118A, W90A, W90Y, and R132E of rAPOBEC1, or one or more corresponding mutations in another APOBEC deaminase.

[0604] In some embodiments, an APOBEC deaminase incorporated into a base editor can comprise one or more mutations selected from the group consisting of D316X, D317X, R320X, R320X, R313X, W285X, W285X, R326X of hAPOBEC3G, or one or more corresponding mutations in another APOBEC deaminase, wherein X is any amino acid. In some embodiments, any of the fusion proteins provided herein comprise an APOBEC deaminase comprising one or more mutations selected from the group consisting of D316R, D317R, R320A, R320E, R313A, W285A, W285Y, R326E of hAPOBEC3G, or one or more corresponding mutations in another APOBEC deaminase.

[0605] In some embodiments, an APOBEC deaminase incorporated into a base editor can comprise a H121R and a H122R mutation of rAPOBEC1, or one or more corresponding mutations in another APOBEC deaminase. In some embodiments an APOBEC deaminase incorporated into a base editor can comprise an APOBEC deaminase comprising a R126A mutation of rAPOBEC1, or one or more corresponding mutations in another APOBEC deaminase. In some embodiments, an APOBEC deaminase incorporated into a base editor can comprise an APOBEC deaminase comprising a R126E mutation of rAPOBEC1, or one or more corresponding mutations in another APOBEC deaminase. In some embodiments, an APOBEC deaminase incorporated into a base editor can comprise an APOBEC deaminase comprising a R118A mutation of rAPOBEC1, or one or more corresponding mutations in another APOBEC deaminase. In some embodiments, an APOBEC deaminase incorporated into a base editor can comprise an APOBEC deaminase comprising a W90A mutation of rAPOBEC1, or one or more corresponding mutations in another APOBEC deaminase. In some embodiments, an APOBEC deaminase incorporated into a base editor can comprise an APOBEC deaminase comprising a W90Y mutation of rAPOBEC1, or one or more corresponding mutations in another APOBEC deaminase. In some embodiments, an APOBEC deaminase incorporated into a base editor can comprise an APOBEC deaminase comprising a R132E mutation of rAPOBEC1, or one or more corresponding mutations in another APOBEC deaminase. In some embodiments an APOBEC deaminase incorporated into a base editor can comprise an APOBEC deaminase comprising a W90Y and a R126E mutation of rAPOBEC1, or one or more corresponding mutations in another APOBEC deaminase. In some embodiments, an APOBEC deaminase incorporated into a base editor can comprise an APOBEC deaminase comprising a R126E and a R132E mutation of rAPOBEC1, or one or more corresponding mutations in another APOBEC deaminase. In some embodiments, an APOBEC deaminase incorporated into a base editor can comprise an APOBEC deaminase comprising a W90Y and a R132E mutation of rAPOBEC1, or one or more corresponding mutations in another APOBEC deaminase. In some embodiments, an APOBEC deaminase incorporated into a base editor can comprise an APOBEC deaminase comprising a W90Y, R126E, and R132E mutation of rAPOBEC1, or one or more corresponding mutations in another APOBEC deaminase.

[0606] In some embodiments, an APOBEC deaminase incorporated into a base editor can comprise an APOBEC deaminase comprising a D316R and a D317R mutation of hAPOBEC3G, or one or more corresponding mutations in another APOBEC deaminase. In some embodiments, any of the fusion proteins provided herein comprise an APOBEC deaminase comprising a R320A mutation of hAPOBEC3G, or one or more corresponding mutations in another APOBEC deaminase. In some embodiments, an APOBEC deaminase incorporated into a base editor can comprise an APOBEC deaminase comprising a R320E mutation of hAPOBEC3G, or one or more corresponding mutations in another APOBEC deaminase. In some embodiments, an APOBEC deaminase incorporated into a base editor can comprise an APOBEC deaminase comprising a R313A mutation of hAPOBEC3G, or one or more corresponding mutations in another APOBEC deaminase. In some embodiments, an APOBEC deaminase incorporated into a base editor can comprise an APOBEC deaminase comprising a W285A mutation of hAPOBEC3G, or one or more corresponding mutations in another APOBEC deaminase. In some embodiments, an APOBEC deaminase incorporated into a base editor can comprise an APOBEC deaminase comprising a W285Y mutation of hAPOBEC3G, or one or more corresponding mutations in another APOBEC deaminase. In some embodiments, an APOBEC deaminase incorporated into a base editor can comprise an APOBEC deaminase comprising a R326E mutation of hAPOBEC3G, or one or more corresponding mutations in another APOBEC deaminase. In some embodiments, an APOBEC deaminase incorporated into a base editor can comprise an APOBEC deaminase comprising a W285Y and a R320E mutation of hAPOBEC3G, or one or more corresponding mutations in another APOBEC deaminase. In some embodiments, an APOBEC deaminase incorporated into a base editor can comprise an APOBEC deaminase comprising a R320E and a R326E mutation of hAPOBEC3G, or one or more corresponding mutations in another APOBEC deaminase. In some embodiments, an APOBEC deaminase incorporated into a base editor can comprise an APOBEC deaminase comprising a W285Y and a R326E mutation of hAPOBEC3G, or one or more corresponding mutations in another APOBEC deaminase. In some embodiments, an APOBEC deaminase incorporated into a base editor can comprise an APOBEC deaminase comprising a W285Y, R320E, and R326E mutation of hAPOBEC3G, or one or more corresponding mutations in another APOBEC deaminase.

[0607] A number of modified cytidine deaminases are commercially available, including, but not limited to, SaBE3, SaKKH-BE3, VQR-BE3, EQR-BE3, VRER-BE3, YE1-BE3, EE-BE3, YE2-BE3, and YEE-BE3, which are available from Addgene (plasmids 85169, 85170, 85171, 85172, 85173, 85174, 85175, 85176, 85177). In some embodiments, a deaminase incorporated into a base editor comprises all or a portion of an APOBEC1 deaminase.

[0608] In some embodiments, the fusion proteins of the invention comprise one or more cytidine deaminase domains. In some embodiments, the cytidine deaminases provided herein are capable of deaminating cytosine or 5-methylcytosine to uracil or thymine. In some embodiments, the cytidine deaminases provided herein are capable of deaminating cytosine in DNA. The cytidine deaminase may be derived from any suitable organism. In some embodiments, the cytidine deaminase is a naturally-occurring cytidine deaminase that includes one or more mutations corresponding to any of the mutations provided herein. One of skill in the art will be able to identify the corresponding residue in any homologous protein, e.g., by sequence alignment and determination of homologous residues. Accordingly, one of skill in the art would be able to generate mutations in any naturally-occurring cytidine deaminase that corresponds to any of the mutations described herein. In some embodiments, the cytidine deaminase is from a prokaryote. In some embodiments, the cytidine deaminase is from a bacterium. In some embodiments, the cytidine deaminase is from a mammal (e.g., human).

[0609] In some embodiments, the cytidine deaminase comprises an amino acid sequence that is at least 60%, at least 65%, at least 70%, at least 75%, at least 80%, at least 85%, at least 90%, at least 95%, at least 96%, at least 97%, at least 98%, at least 99%, or at least 99.5% identical to any one of the cytidine deaminase amino acid sequences set forth herein. It should be appreciated that cytidine deaminases provided herein may include one or more mutations (e.g., any of the mutations provided herein). Some embodiments provide a polynucleotide molecule encoding the cytidine deaminase nucleobase editor polypeptide of any previous aspect or as delineated herein. In some embodiments, the polynucleotide is codon optimized.

[0610] The disclosure provides any deaminase domains with a certain percent identity plus any of the mutations or combinations thereof described herein. In some embodiments, the cytidine deaminase comprises an amino acid sequence that has 1, 2, 3, 4, 5, 6, 7, 8, 9, 10, 11, 12, 13, 14, 15, 16, 17, 18, 19, 20, 21, 22, 21, 24, 25, 26, 27, 28, 29, 30, 31, 32, 33, 34, 35, 36, 37, 38, 39, 40, 41, 42, 43, 44, 45, 46, 47, 48, 49, 50, or more mutations compared to a reference sequence, or any of the cytidine deaminases provided herein. In some embodiments, the cytidine deaminase comprises an amino acid sequence that has at least 5, at least 10, at least 15, at least 20, at least 25, at least 30, at least 35, at least 40, at least 45, at least 50, at least 60, at least 70, at least 80, at least 90, at least 100, at least 110, at least 120, at least 130, at least 140, at least 150, at least 160, or at least 170 identical contiguous amino acid residues as compared to any one of the amino acid sequences known in the art or described herein.

[0611] Details of C to T nucleobase editing proteins are described in International PCT Application No. PCT/US2016/058344 (WO2017/070632) and Komor, A. C., et al., “Programmable editing of a target base in genomic DNA without double-stranded DNA cleavage” Nature 533, 420-424 (2016), the entire contents of which are hereby incorporated by reference.

### Cytidine Adenosine Base Editors (CABEs)

[0612] In some embodiments, a base editor described herein comprises an adenosine deaminase variant that has increased cytidine deaminase activity. Such base editors may be referred to as “cytidine adenosine base editors (CABEs). Representative CABEs include those described in PCT/US22/22050, the disclosure of which is incorporated herein by reference in its entirety for all purposes. In some instances, an adenosine deaminase variant has both adenine and cytosine deaminase activity (i.e., is a dual deaminase). In some embodiments, the adenosine deaminase variants deaminate adenine and cytosine in DNA. In some embodiments, the adenosine deaminase variants deaminate adenine and cytosine in single-stranded DNA. In some embodiments, the adenosine deaminase variants deaminate adenine and cytosine in RNA. In some embodiments, the adenosine deaminase variant predominantly deaminates cytosine in DNA and/or RNA (e.g., greater than 30%, 40%, 50%, 60%, 70%, 80%, 90%, 95%, or 99% of all deaminations catalyzed by the adenosine deaminase variant, or the number of cytosine deaminations catalyzed by the variant is about or at least about 2-fold, 3-fold, 4-fold, 5-fold, 6-fold, 7-fold, 8-fold, 9-fold, 10-fold, 25-fold, 50-fold, 75-fold, 100-fold, 500-fold, or 1,000-fold greater than the number adenine deaminations catalyzed by the variant). In some embodiments, the adenosine deaminase variant has approximately equal cytosine and adenosine deaminase activity (e.g., the two activities are within about 10% or 20% of each other). In some embodiments, the adenosine deaminase variant has predominantly cytosine deaminase activity, and little, if any, adenosine deaminase activity. In some embodiments, the adenosine deaminase variant has cytosine deaminase activity, and no significant or no detectable adenosine deaminase activity. In some embodiments, the target polynucleotide is present in a cell in vitro or in vivo. In some embodiments, the cell is a bacteria, yeast, fungi, insect, plant, or mammalian cell.

[0613] In some embodiments, the CABE comprises a bacterial TadA deaminase variant (e.g., ecTadA). In some embodiments, the CABE comprises a truncated TadA deaminase variant. In some embodiments, the CABE comprises a fragment of a TadA deaminase variant. In some embodiments, the CABE comprises a TadA*8.20 variant.

[0614] In some embodiments, the adenosine deaminase variants of the invention comprise one or more alterations. In some embodiments, an adenosine deaminase variant of the invention is a TadA adenosine deaminase comprising one or more alterations that increase cytosine deaminase activity (e.g., at least about 10-fold, 20-fold, 30-fold, 40-fold, 50-fold, 60-fold, 70-fold or more increase) while maintaining adenosine deaminase activity (e.g., at least about 30%, 40%, 50% or more of the activity of a reference adenosine deaminase (e.g., TadA*8.20 or TadA*8.19)). In some embodiments, the adenosine deaminase variant is a bacterial TadA deaminase variant (e.g., ecTadA). In some embodiments, the adenosine deaminase variant is a truncated TadA deaminase variant. In some embodiments, the adenosine deaminase variant is a fragment of a TadA deaminase variant. In some embodiments, an adenosine deaminase variant is a TadA*8 variant comprising one or more alterations that increase cytosine deaminase activity (e.g., at least about 10-fold, 20-fold, 30-fold, 40-fold, 50-fold, 60-fold, 70-fold or more increase) while maintaining adenosine deaminase activity of at least about 30%, 40%, 50% or more of the adenosine deaminase activity of a reference adenosine deaminase (e.g., TadA*8.20 or TadA*8.19). In some embodiments, an adenosine deaminase variant is a TadA*8.20 adenosine deaminase comprising one or more alterations that increase cytosine deaminase activity (e.g., at least about 10-fold, 20-fold, 30-fold, 40-fold, 50-fold, 60-fold, 70-fold or more increase) while maintaining adenosine deaminase activity of at least 30%, 40%, 50% of the activity of a reference adenosine deaminase (e.g., TadA*8.20 or TadA*8.19). In some embodiments, an adenosine deaminase variant as provided herein has an increased cytosine deaminase activity of at least about 10-fold, 20-fold, 30-fold, 40-fold, 50-fold, 60-fold, 70-fold, 80-fold, 90-fold, 100-fold or more relative to a reference adenosine deaminase (e.g., TadA*8.20 or TadA*8.19). In some embodiments, an adenosine deaminase variant as provided herein maintains a level of adenosine deaminase activity that is at least about 30%, 40%, 50%, 60%, 70% of the activity of a reference adenosine deaminase (e.g., TadA*8.20 or TadA*8.19). In some embodiments, the reference adenosine deaminase is TadA*8.20 or TadA*8.19.

[0615] In some embodiments, the adenosine deaminase variant is an adenosine deaminase comprising one or more alterations that increase cytosine deaminase activity and has an amino acid sequence that is at least about 70%, 75%, 80%, 85%, 90%, 95%, 98%, 99% or greater identity to SEQ ID NO: 1 below:

(SEQ ID NO: 1)
MSEVEFSHEYWMRHALTLAKRARDEREVPVGAVLVLNNRVIGEGWNRAI
GLHDPTAHAEIMALRQGGLVMQNYRLIDATLYVTFEPCVMCAGAMIHSR
IGRVVFGVRNAKTGAAGSLMDVLHYPGMNHRVEITEGILADECAALLCY
FFRMPRQVFNAQKKAQSSTD

[0616] In some embodiments, the adenosine deaminase variant is an adenosine deaminase comprising the amino acid sequence of SEQ ID NO: 1 and one or more alterations that increase cytosine deaminase activity. In various embodiments, the one or more alterations of the invention do not include a R amino acid at position 48 of SEQ ID NO: 1, or a corresponding mutation in another adenosine deaminase.

[0617] In some embodiments, the adenosine deaminase variant is an adenosine deaminase comprising one or more alterations at an amino acid position selected from 2, 4, 6, 13, 27, 29, 100, 112, 114, 115, 162, and 165 of an amino acid sequence having at least about 70%, 75%, 80%, 85%, 90%, 95%, 98%, 99% or greater identity to SEQ ID NO: 1, or a corresponding alteration in another deaminase. In some embodiments, the adenosine deaminase variant is an adenosine deaminase comprising two or more alterations at an amino acid position selected from the group consisting of 2, 4, 6, 8, 13, 17, 23, 27, 29, 30, 47, 48, 49, 67, 76, 77, 82, 84, 96, 100, 107, 112, 114, 115, 118, 119, 122, 127, 142, 143, 147, 149, 158, 159, 162 165, 166, and 167, of an amino acid sequence having at least about 70%, 75%, 80%, 85%, 90%, 95%, 98%, 99% or greater identity to SEQ ID NO: 1, or a corresponding alteration in another deaminase. In some embodiments, the two or more alterations are at an amino acid position selected from the group consisting of S2X, V4X, F6X, H8X, R13X, T17X, R23X, E27X, P29X, V30X, R47X, A48X, I49X, G67X, Y76X, D77X, S82X, F84X, H96X, G100X, R107X, G112X, A114X, G115X, M118X, D119X, H122X, N127X, A142X, A143X, R147X, Y147X, F149X, A158X, Q159X, A162X, S165X, T166X, and D167X of an amino acid sequence having at least about 70%, 75%, 80%, 85%, 90%, 95%, 98%, 99% or greater identity to SEQ ID NO: 1, or a corresponding alteration in another deaminase. In various embodiments, the alterations of the invention do not include a 48R mutation. In some embodiments, the adenosine deaminase variant is an adenosine deaminase comprising one or more alterations at an amino acid position selected from 2, 4, 6, 13, 27, 29, 100, 112, 114, 115, 162, and 165 of an amino acid sequence having at least about 70%, 75%, 80%, 85%, 90%, 95%, 98%, 99% or greater identity to SEQ ID NO: 1, or a corresponding alteration in another deaminase.

[0618] In some embodiments, the adenosine deaminase variant is an adenosine deaminase comprising one or more alterations selected from the group consisting of S2H, V4K, V4S, V4T, V4Y, F6G, F6H, F6Y, H8Q, R13G, T17A, T17W, R23Q, E27C, E27G, E27H, E27K, E27Q, E27S, E27G, P29A, P29G, P29K, V30F, V30I, R47G, R47S, A48G, I49K, I49M, I49N, I49Q, I49T, G67W, I76H, I76R, I76W, Y76H, Y76R, Y76W, F84A, F84M, H96N, G100A, G100K, T111H, G112H, A114C, G115M, M118L, H122G, H122R, H122T, N1271, N127K, N127P, A142E, R147H, A158V, Q159S, A162C, A162N, A162Q, and S165P of an amino acid sequence having at least about 70%, 75%, 80%, 85%, 90%, 95%, 98%, 99% or greater identity to SEQ ID NO: 1, or a corresponding alteration in another deaminase.

[0619] In some embodiments, the adenosine deaminase variant is an adenosine deaminase comprising a combination of amino acid alterations selected from: E27H, Y76I, and F84M; E27H, I49K, and Y76I; E27S, I49K, Y76I, and A162N; E27K and D119N; E27H and Y76I; E27S, I49K, and G67W; E27S, 149K, and Y761; 149T, G67W, and H96N; E27C, Y76I, and D119N; R13G, E27Q, and N127K; T17A, E27H, 149M, Y761, and M118L; I49Q, Y76I, and G115M; S2H, I49K, Y76I, and G112H; R47S and R107C; H8Q, I49Q, and Y76I; T17A, A48G, S82T, and A142E; E27G and I49N; E27G, D77G, and S165P; E27S, I49K, and S82T; E27S, I49K, S82T, and G115M; E27S, V301, 149K, and S82T; E27S, V30F, I49K, S82T, F84A, R107C, and A142E; E27S, V30F, I49K, S82T, F84A, G112H, and A142E; E27S, V30F, I49K, S82T, F84A, G115M, and A142E; E27S, I49K, S82T, F84L, and R107C; E27S, I49K, S82T, F84L, and G112H; E27S, I49K, S82T, F84L, and G115M; E27S, I49K, S82T, F84L, R107C, and G112H; E27S, I49K, S82T, F84L, R107C, and G115M; E27S, I49K, S82T, F84L, R107C, and A142E; E27S, I49K, S82T, F84L, G112H, and A142E; E27S, I49K, S82T, F84L, G115M, and A142E; E27S, I49K, S82T, F84L, R107C, G112H, GI15M, and A142E; E27S, V301, 149K, S82T, and F84L; E27S, P29G, I49K, and S82T; E27S, P29G, I49K, S82T, and G115M; E27S, P29G, I49K, S82T, and A142E; P29G, I49K, and S82T; E27G, I49K, and S82T; E27G, I49K, S82T, R107C, and A142E; V4K, E27H, 149K, Y761, and A114C; V4K, E27H, I49K, Y76I, and D77G; F6Y, E27H, I49K, Y76I, G100A, and H122R; V4T, E27H, I49K, Y76R, and H122G; F6Y, E27H, I49K, and Y76W; F6Y, E27H, 149K, Y761, and D119N; F6Y, E27H, I49K, Y76I, and A114C; F6Y, E27H, I49K, and Y76I; V4K, E27H, 149K, Y76W, and H122T; F6G, E27H, I49K, Y76R, and G100K; F6H, E27H, I49K, Y76I, and H122N; E27H, I49K, Y76I, and A114C; F6Y, E27H, I49K, Y76H, H122R, and T1661; E27H, 149K, Y761, and N127P; R23Q, E27H, I49K, and Y76R; E27H, I49K, Y76H, H122R, and A158V; F6Y, E27H, I49K, Y76I, and T111H; E27H, I49K, Y76I, and R147H; E27H, I49K, Y76I, and A143E; F6Y, E27H, I49K, and Y76R; T17W, E27H, I49K, Y76H, H122G, and A158V; V4S, E27H, I49K, A143E, and Q159S; E27H, I49K, Y76I, N127I, and A162Q; T17A, E27H, and A48G; T17A, E27K, and A48G; T17A, E27S, and A48G; T17A, E27S, A48G, and I49K; T17A, E27G, and A48G; T17A, A48G, and I49N; T17A, E27G, A48G, and I49N; T17A, E27Q, and A48G; E27S, I49K, S82T, and R107C; E27S, I49K, S82T, and G112H; E27S, I49K, S82T, and A142E; E27S, I49K, S82T, R107C, and G112H; E27S, I49K, S82T, R107C, and G115M; E27S, 149K, S82T, R107C, and A142E; E27S, I49K, S82T, G112H, and A142E; E27S, 149K, S82T, G115M, and A142E; E27S, I49K, S82T, R107C, G112H, G115M, and A142E; E27S, V301, 149K, S82T, and R107C; E27S, V301, 149K, S82T, and G112H; E27S, V301, 149K, S82T, and G115M; E27S, V30I, I49K, S82T, and A142E; E27S, V301, 149K, S82T, R107C, and G112H; E27S, V301, I49K, S82T, R107C, and G115M; E27S, V301, 149K, S82T, R107C, and A142E; E27S, V30I, I49K, S82T, G112H, and A142E; E27S, V301, 149K, S82T, G115M, and A142E; E27S, V30I, I49K, S82T, R107C, G112H, G115M, and A142E; E27S, V30L, I49K, and S82T; E27S, V30L, I49K, S82T, and R107C; E27S, V30L, I49K, S82T, and G112H; E27S, V30L, 149K, S82T, and G115M; E27S, V30L, I49K, S82T, and A142E; E27S, V30L, I49K, S82T, R107C, and G112H; E27S, V30L, I49K, S82T, R107C, and G115M; E27S, V30L, I49K, S82T, R107C, and A142E; E27S, V30L, I49K, S82T, G112H, and A142E; E27S, V30L, I49K, S82T, G115M, and A142E; E27S, V30L, I49K, S82T, R107C, G112H, G115M, and A142E; E27S, V30F, 149K, S82T, and F84A; E27S, V30F, I49K, S82T, F84A, and R107C; E27S, V30F, I49K, S82T, F84A, and G112H; E27S, V30F, I49K, S82T, F84A, and G115M; E27S, V30F, I49K, S82T, F84A, and A142E; E27S, V30F, I49K, S82T, F84A, R107C, and G112H; E27S, V30F, I49K, S82T, F84A, R107C, and G115M; E27S, V30F, I49K, S82T, F84A, R107C, G112H, G115M, and A142E; E27S, I49K, S82T, and F84L; E27S, I49K, S82T, F84L, and A142E; E27S, V301, 149K, S82T, F84L, and R107C; E27S, V301, 149K, S82T, F84L, and G112H; E27S, V301, 149K, S82T, F84L, and G115M; E27S, V301, 149K, S82T, F84L, and A142E; E27S, V301, 149K, S82T, F84L, R107C, and G112H; E27S, V301, 149K, S82T, F84L, R107C, and G115M; E27S, V301, 149K, S82T, F84L, R107C, and A142E; E27S, V301, 149K, S82T, F84L, G112H, and A142E; E27S, V301, 149K, S82T, F84L, G115M, and A142E; E27S, V301, 149K, S82T, F84L, R107C, G112H, G115M, and A142E; E27S, P29G, I49K, S82T, and R107C; E27S, P29G, 149K, S82T, and G112H; E27S, P29G, I49K, S82T, R107C, and G112H; E27S, P29G, 149K, S82T, R107C, and G115M; E27S, P29G, I49K, S82T, R107C, and A142E; E27S, P29G, 149K, S82T, G112H, and A142E; E27S, P29G, I49K, S82T, G115M, and A142E; E27S, P29G, I49K, S82T, R107C, G112H, G115M, and A142E; P29G, I49K, S82T, and R107C; P29G, 149K, S82T, and G112H; P29G, I49K, S82T, and G115M; P29G, I49K, S82T, and A142E; P29G, I49K, S82T, R107C, and G112H; P29G, I49K, S82T, R107C, and G115M; P29G, I49K, S82T, R107C, and A142E; P29G, I49K, S82T, G112H, and A142E; P29G, I49K, S82T, G115M, and A142E; P29G, I49K, S82T, R107C, G112H, G115M, and A142E; P29K, I49K, and S82T; P29K, 149K, S82T, and R107C; P29K, I49K, S82T, and G112H; P29K, I49K, S82T, and G115M; P29K, I49K, S82T, and A142E; P29K, I49K, S82T, R107C, and G112H; P29K, I49K, S82T, R107C, and G115M; P29K, I49K, S82T, R107C, and A142E; P29K, I49K, S82T, G112H, and A142E; P29K, I49K, S82T, G115M, and A142E; P29K, I49K, S82T, R107C, G112H, G115M, and A142E; P29K, V301, 149K, and S82T; P29K, V301, 149K, S82T, and R107C; P29K, V301, 149K, S82T, and G112H; P29K, V301, 149K, S82T, and G115M; P29K, V301, 149K, S82T, and A142E; P29K, V301, 149K, S82T, R107C, and G112H; P29K, V301, 149K, S82T, R107C, and G115M; P29K, V301, 149K, S82T, R107C, and A142E; P29K, V301, 149K, S82T, G112H, and A142E; P29K, V301, 149K, S82T, G115M, and A142E; P29K, V301, 149K, S82T, R107C, G112H, G115M, and A142E; P29K, I49K, S82T, and F84L; P29K, I49K, S82T, F84L, and R107C; P29K, I49K, S82T, F84L, and G112H; P29K, I49K, S82T, F84L, and G115M; P29K, I49K, S82T, F84L, and A142E; P29K, I49K, S82T, F84L, R107C, and G112H; P29K, I49K, S82T, F84L, R107C, and G115M; P29K, I49K, S82T, F84L, R107C, and A142E; P29K, I49K, S82T, F84L, G112H, and A142E; P29K, I49K, S82T, F84L, G115M, and A142E; P29K, I49K, S82T, F84L, R107C, G112H, G115M, and A142E; P29K, V301, 149K, S82T, and F84L; P29K, V301, 149K, S82T, F84L, and R107C; P29K, V301, 149K, S82T, F84L, and G112H; P29K, V301, 149K, S82T, F84L, and G115M; P29K, V301, 149K, S82T, F84L, and A142E; P29K, V301, 149K, S82T, F84L, R107C, and G112H; P29K, V301, 149K, S82T, F84L, R107C, and G115M; P29K, V301, I49K, S82T, F84L, R107C, and A142E; P29K, V301, 149K, S82T, F84L, G112H, and A142E; P29K, V301, 149K, S82T, F84L, G115M, and A142E; P29K, V301, 149K, S82T, F84L, R107C, G112H, G115M, and A142E; E27G, I49K, S82T, and R107C; E27G, 149K, S82T, and G112H; E27G, I49K, S82T, and G115M; E27G, I49K, S82T, and A142E; E27G, I49K, S82T, R107C, and G112H; E27G, I49K, S82T, R107C, and G115M; E27G, I49K, S82T, G112H, and A142E; E27G, I49K, S82T, G115M, and A142E; E27G, I49K, S82T, R107C, G112H, G115M, and A142E; E27H, I49K, and S82T; E27H, I49K, S82T, and R107C; E27H, 149K, S82T, and G112H; E27H, I49K, S82T, and G115M; E27H, I49K, S82T, and A142E; E27H, I49K, S82T, R107C, and G112H; E27H, I49K, S82T, R107C, and G115M; E27H, 149K, S82T, R107C, and A142E; E27H, I49K, S82T, G112H, and A142E; E27H, I49K, S82T, G115M, and A142E; E27H, I49K, S82T, R107C, G112H, G115M, and A142E; E27S, and S82T; E27S, S82T, and R107C; E27S, S82T, and G112H; E27S, S82T, and G115M; E27S, S82T, and A142E; E27S, S82T, R107C, and G112H; E27S, S82T, R107C, and G115M; E27S, S82T, R107C, and A142E; E27S, S82T, G112H, and A142E; E27S, S82T, G115M, and A142E; E27S, S82T, R107C, G112H, G115M, and A142E; P29A, and S82T; P29A, S82T, and R107C; P29A, S82T, and G112H; P29A, S82T, and G115M; P29A, S82T, and A142E; P29A, S82T, R107C, and G112H; P29A, S82T, R107C, and G115M; P29A, S82T, R107C, and A142E; P29A, S82T, G112H, and A142E; P29A, S82T, G115M, and A142E; P29A, S82T, R107C, G112H, G115M, and A142E; E27S, V30I, and S82T; E27S, V30I, S82T, and R107C; E27S, V30I, S82T, and G112H; E27S, V30I, S82T, and G115M; E27S, V30I, S82T, and A142E; E27S, V30I, S82T, R107C, and G112H; E27S, V30I, S82T, R107C, and G115M; E27S, V30I, S82T, R107C, and A142E; E27S, V30I, S82T, G112H, and A142E; E27S, V30I, S82T, G115M, and A142E; E27S, V30I, S82T, R107C, G112H, G115M, and A142E; P29A, V30I, S82T, and F84L; P29A, V30I, S82T, F84L, and R107C; P29A, V30I, S82T, F84L, and G112H; P29A, V30I, S82T, F84L, and G115M; P29A, V30I, S82T, F84L, and A142E; P29A, V30I, S82T, F84L, R107C, and G112H; P29A, V30I, S82T, F84L, R107C, and G115M; P29A, V30I, S82T, F84L, R107C, and A142E; P29A, V30I, S82T, F84L, G112H, and A142E; P29A, V30I, S82T, F84L, G115M, and A142E; P29A, V30I, S82T, F84L, R107C, G112H, G115M, and A142E; E27S, P29A, V30L, I49K, S82T, F84L, R107C, G112H, G115M, and A142E; V4K, and A114C; V4K, and D77G; F6Y, G100A, and H122R; V4T, I76R, and H122G; F6Y, and I76W; F6Y, and D119N; F6Y, and A114C; V4K, I76W, and H122T; F6G, I76R, and G100K; F6H, and H122N; F6Y, 176H, H122R, and T1661; R23Q, and I76R; I76H, H122R, and A158V; F6Y, and T111H; T111H, H122G, and A162C; F6Y, and I76R; T17W, I76H, H122G, and A158V; V4S, I76Y, A143E, and Q159S; N127I, A162Q; E27H, Y76I, F84M, and F149Y; E27H, I49K, Y76I, and F149Y; T17A, E27H, I49M, Y76I, M118L, and F149Y; T17A, A48G, S82T, A142E, and F149Y; E27G, and F149Y; E27G, I49N, and F149Y; E27H, Y76I, F84M, Y147D, F149Y, T1661, and D167N; E27H, I49K, Y76I, Y147D, F149Y, T1661, D167N; T17A, E27H, I49M, Y76I, M118L, Y147D, F149Y, T1661, and D167N; T17A, A48G, S82T, A142E, Y147D, F149Y, T166I, and D167N; E27G, Y147D, F149Y, T1661, and D167N; E27G, I49N, Y147D, F149Y, T1661, and D167N; F6Y, E27H, I49K, Y76W, S82T, R107C, G112H, G115M, and A142E; F6Y, E27H, I49K, D77G, S82T, R107C, G112H, G115M, and A142E; F6Y, E27H, I49K, S82T, R107C, G112H, A114C, G115M, and A142E; F6Y, E27H, I49K, S82T, R107C, G112H, G115M, D119N, and A142E; F6Y, E27H, I49K, S82T, R107C, G112H, G115M, H122G, and A142E; F6Y, E27H, I49K, S82T, R107C, G112H, G115M, N127P, and A142E; F6Y, E27H, I49K, S82T, R107C, G112H, G115M, A142E, and A143E; F6Y, E27H, I49K, S82T, R107C, G112H, G115M, and A143E; F6Y, E27H, I49K, Y76W, D77G, S82T, R107C, G112H, G115M, and A142E; F6Y, E27H, I49K, Y76W, S82T, R107C, G112H, A114C, G115M, and A142E; F6Y, E27H, I49K, Y76W, S82T, R107C, G112H, G115M, D119N, and A142E; F6Y, E27H, I49K, Y76W, S82T, R107C, G112H, G115M, H122G, and A142E; F6Y, E27H, I49K, Y76W, S82T, R107C, G112H, G115M, N127P, and A142E; F6Y, E27H, I49K, Y76W, S82T, R107C, G112H, G115M, A142E, and A143E; F6Y, E27H, I49K, Y76W, S82T, R107C, G112H, G115M, and A143E; F6Y, E27H, I49K, D77G, S82T, R107C, G112H, A114C, G115M, and A142E; F6Y, E27H, I49K, D77G, S82T, R107C, G112H, G115M, D119N, and A142E; F6Y, E27H, I49K, D77G, S82T, R107C, G112H, G115M, H122G, and A142E; F6Y, E27H, I49K, D77G, S82T, R107C, G112H, G115M, N127P, and A142E; F6Y, E27H, I49K, D77G, S82T, R107C, G112H, G115M, A142E, and A143E; F6Y, E27H, I49K, D77G, S82T, R107C, G112H, G115M, and A143E; F6Y, E27H, I49K, S82T, R107C, G112H, A114C, G115M, D119N, and A142E; F6Y, E27H, I49K, S82T, R107C, G112H, A114C, G115M, H122G, and A142E; F6Y, E27H, I49K, S82T, R107C, G112H, A114C, G115M, N127P, and A142E; F6Y, E27H, I49K, S82T, R107C, G112H, G115M, D119N, H122G, and A142E; F6Y, E27H, I49K, S82T, R107C, G112H, G115M, D119N, N127P, and A142E; F6Y, E27H, I49K, S82T, R107C, G112H, G115M, H122G, N127P, and A142E; F6Y, E27H, I49K, Y76W, D77G, S82T, R107C, G112H, A114C, G115M, and A142E; F6Y, E27H, I49K, Y76W, D77G, S82T, R107C, G112H, G115M, D119N, and A142E; F6Y, E27H, I49K, Y76W, D77G, S82T, R107C, G112H, G115M, H122G, and A142E; F6Y, E27H, I49K, Y76W, D77G, S82T, R107C, G112H, G115M, N127P, and A142E; F6Y, E27H, I49K, Y76W, D77G, S82T, R107C, G112H, G115M, A142E, and A143E; F6Y, E27H, I49K, Y76W, D77G, S82T, R107C, G112H, G115M, and A143E; F6Y, E27H, I49K, Y76W, S82T, R107C, G112H, A114C, G115M, D119N, and A142E; F6Y, E27H, I49K, Y76W, S82T, R107C, G112H, A114C, G115M, H122G, and A142E; F6Y, E27H, I49K, Y76W, S82T, R107C, G112H, A114C, G115M, N127P, and A142E; F6Y, E27H, I49K, Y76W, S82T, R107C, G112H, A114C, G115M, A142E, and A143E; F6Y, E27H, I49K, Y76W, S82T, R107C, G112H, A114C, G115M, and A143E; F6Y, E27H, I49K, Y76W, S82T, R107C, G112H, G115M, D119N, H122G, and A142E; F6Y, E27H, I49K, Y76W, S82T, R107C, G112H, G115M, D119N, N127P, and A142E; F6Y, E27H, I49K, Y76W, S82T, R107C, G112H, G115M, H122G, N127P, and A142E; F6Y, E27H, I49K, Y76W, S82T, R107C, G112H, A114C, G115M, D119N, H122G, and A142E; F6Y, E27H, I49K, Y76W, S82T, R107C, G112H, A114C, G115M, D119N, N127P, and A142E; F6Y, E27H, I49K, Y76W, S82T, R107C, G112H, A114C, G115M, H122G, N127P, and A142E; F6Y, E27H, I49K, Y76W, D77G, S82T, R107C, G112H, A114C, G115M, D119N, and A142E; F6Y, E27H, I49K, Y76W, D77G, S82T, R107C, G112H, A114C, G115M, H122G, and A142E; F6Y, E27H, I49K, Y76W, D77G, S82T, R107C, G112H, A114C, G115M, N127P, and A142E; F6Y, E27H, I49K, Y76W, D77G, S82T, R107C, G112H, A114C, G115M, A142E, and A143E; F6Y, E27H, I49K, Y76W, D77G, S82T, R107C, G112H, A114C, G115M, and A143E; F6Y, E27H, I49K, Y76W, D77G, S82T, R107C, G112H, A114C, G115M, D119N, H122G,and A142E; F6Y, E27H, I49K, Y76W, D77G, S82T, R107C, G112H, A114C, G115M, D119N, N127P, and A142E; F6Y, E27H, I49K, Y76W, D77G, S82T, R107C, G112H, A114C, G115M, H122G, N127P, and A142E; F6Y, E27H, I49K, Y76W, S82T, R107C, G112H, A114C, G115M, D119N, H122G, N127P, A142E, and A143E; F6Y, E27H, I49K, Y76W, S82T, R107C, G112H, A114C, G115M, D119N, H122G, N127P, and A143E; F6Y, E27H, I49K, Y76W, D77G, S82T, R107C, G112H, A114C, G115M, D119N, H122G, N127P, A142E, and A143E; and F6Y, E27H, I49K, Y76W, D77G, S82T, R107C, G112H, A114C, G115M, D119N, H122G, N127P, and A143E; of an amino acid sequence having at least about 70%, 75%, 80%, 85%, 90%, 95%, 98%, 99% or greater identity to SEQ ID NO: 1, or a corresponding combination of alterations in another deaminase.

[0620] In some embodiments, the adenosine deaminase variant is an adenosine deaminase comprising an amino acid alteration or combination of amino acid alterations selected from those listed in any of Tables 6.2A-6.2F.

[0621] The residue identity of exemplary adenosine deaminase variants that are capable of deaminating adenine and/or cytidine in a target polynucleotide (e.g., DNA) is provided in Tables 6.2A-6.2F below. Further examples of adenosine deaminse variants include the following variants of 1.17 (see Table 6.2A): 1.17+E27H; 1.17+E27K; 1.17+E27S; 1.17+E27S+I49K; 1.17+E27G; 1.17+149N; 1.17+E27G+I49N; and 1.17+E27Q. In some embodiments, any of the amino acid alterations provided herein are substituted with a conservative amino acid. Additional mutations known in the art can be further added to any of the adenosine deaminase variants provided herein.

[0622] In some embodiments, base editing is carried out to induce therapeutic changes in the genome of a cell of a subject (e.g., human). Cells are collected from a subject and contacted with one or more guide RNAs and a nucleobase editor polypeptide comprising a nucleic acid programmable DNA binding protein (napDNAbp) (e.g., Cas9) and an adenosine deaminase variant capable of deaminating both adenine and cytosine in a target polynucleotide (e.g., DNA). In some embodiments, cells are contacted with one or more guide RNAs and a fusion protein comprising a nucleic acid programmable DNA binding protein (napDNAbp) (e.g., Cas9) and an adenosine deaminase variant capable of deaminating both adenine and cytosine in a target polynucleotide (e.g., DNA). In some embodiments, the napDNAbp is a Cas9.

[0623] In some embodiments, cells are contacted with a multi-molecular complex. In some embodiments, cells are contacted with a base editor system as provided herein. In some embodiments, the base editor systems as provided herein comprise an adenosine base editor (ABE) variant (e.g., a CABE). In some embodiments, the CABE variant is an ABE8 variant. In some embodiments, the ABE8 variant is an ABE8.20 variant. In some embodiments, CABEs as provided herein have both A to G and C to T base editing activity. Therefore, multiple edits may be introduced into the genome of a subject (e.g., human). The ability to target both A to G and C to T base editing activity allows for diverse targeting of polynucleotides in the genome in a subject to treat a genetic disease or disorder.

[0624] In some embodiments, the base editor systems comprising a CABE provided herein have at least about a 30%, 40%, 50%, 60%, 70% or more C to T editing activity in a target polynucleotide (e.g., DNA). In some embodiments, a base editor system comprising a CABE as provided herein has an increased C to T base editing activity (e.g., increased at least about 30-fold, 40-fold, 50-fold, 60-fold, 70-fold or more) relative to a reference base editor system comprising a reference adenosine deaminase (e.g., TadA*8.20 or TadA*8.19).

TABLE 6.2A
Adenosine Deaminase Variants (CABE-1; T_{AD}AC-1). Mutations are indicated with reference to TadA*8.20.

| | location in structure | | | | | | | | | | | | | |
|---|---|---|---|---|---|---|---|---|---|---|---|---|---|---|
| | | | | | near | near | near | near | | | | | | |
| | | surface | surface | surface | active | active | active | active | | | | | | |
| | N/A | h1 | h1 | h1 | site | site | site | site | | surface | | | | |
| | Amino Acid No. (*START Met is AA#1) | | | | | | | | | | | | | |
| | 2 | 8 | 13 | 17 | 27 | 47 | 48 | 49 | 67 | 76 | 77 | | | |
| | TadA*8.20 | | | | | | | | | | | | | |
| | S | H | R | T | E | R | A | I | G | Y | D | | | |
| | TadA*8.19 | | | | | | | | | | | Plasmid #s | | |
| | | | | | | | | | | I | | without ugi | with ugi | bacterial |
| 1.1 | | | | | H | | | | | I | | pDKL-11 | pDKL-23 | pDKL-35 |
| 1.2 | | | | | H | | | K | | I | | pDKL-12 | pDKL-24 | pDKL-36 |
| 1.3 | | | | | S | | | K | | I | | pDKL-13 | pDKL-25 | pDKL-37 |
| 1.4 | | | | | S | | | K | | I | | pDKL-14 | pDKL-26 | pDKL-38 |
| 1.5 | | | | | K | | | | | | | PDKL-15 | pDKL-27 | pDKL-39 |
| 1.6 | | | | | K | | | | | | | pDKL-16 | pDKL-28 | pDKL-40 |
| 1.7 | | | | | H | | | | | I | | pDKL-17 | pDKL-29 | pDKL-41 |
| 1.8 | | | | | S | | | K | W | | | pDKL-18 | pDKL-30 | pDKL-42 |
| 1.9 | | | | | | | | T | W | | | pDKL-19 | pDKL-31 | pDKL-43 |
| 1.10 | | | | | C | | | | | I | | pDKL-20 | pDKL-32 | pDKL-44 |
| 1.11 | | | G | | Q | | | | | | | pDKL-21 | pDKL-33 | pDKL-45 |
| 1.12 | | | | A | H | | | M | | I | | pDKL-22 | pDKL-34 | pDKL-46 |
| 1.13 | | | | | | | | Q | | I | | pDKL-47 | pDKL-55 | pDKL-63 |
| 1.14 | H | | | | | | | K | | I | | pDKL-48 | pDKL-56 | pDKL-64 |
| 1.15 | | | | | | S | | | | | | pDKL-49 | pDKL-57 | pDKL-65 |
| 1.16 | | Q | | | | | | Q | | I | | pDKL-50 | pDKL-58 | pDKL-66 |
| 1.17 | | | | A | | | G | | | | | pDKL-51 | pDKL-59 | pDKL-67 |
| 1.18 | | | | | G | | | | | | | pDKL-52 | pDKL-60 | pDKL-68 |
| 1.19 | | | | | G | | | N | | | | pDKL-53 | pDKL-61 | pDKL-69 |
| 1.20 | | | | | G | | | | | | G | pDKL-54 | pDKL-62 | pDKL-70 |

| | location in structure | | | | | | | | | | | | | | |
|---|---|---|---|---|---|---|---|---|---|---|---|---|---|---|---|
| | | near | | near | | | | | | | | | | | |
| | | active | | active | | | | | | | | | | | |
| | internal | site | | site | surface | | surface | surface | surface | | surface | | | | |
| | Amino Acid No. (*START Met is AA#1) | | | | | | | | | | | | | | |
| | 82 | 84 | 96 | 107 | 112 | 115 | 118 | 119 | 127 | 142 | 162 | 165 | | | |
| | TadA*8.20 | | | | | | | | | | | | | | |
| | S | F | H | R | G | G | M | D | N | A | A | S | Plasmid #s | | |
| | TadA*8.19 | | | | | | | | | | | | without ugi | with ugi | bacterial |
| 1.1 | | M | | | | | | | | | | | pDKL-11 | pDKL-23 | pDKL-35 |
| 1.2 | | | | | | | | | | | | | pDKL-12 | pDKL-24 | pDKL-36 |
| 1.3 | | | | | | | | | | | | | pDKL-13 | pDKL-25 | pDKL-37 |
| 1.4 | | | | | | | | | | | N | | pDKL-14 | pDKL-26 | pDKL-38 |
| 1.5 | | | | | | | | | | | | | pDKL-15 | pDKL-27 | pDKL-39 |
| 1.6 | | | | | | | | N | | | | | pDKL-16 | pDKL-28 | pDKL-40 |
| 1.7 | | | | | | | | | | | | | pDKL-17 | pDKL-29 | pDKL-41 |
| 1.8 | | | | | | | | | | | | | pDKL-18 | pDKL-30 | pDKL-42 |
| 1.9 | | | N | | | | | | | | | | pDKL-19 | pDKL-31 | pDKL-43 |
| 1.10 | | | | | | | | N | | | | | pDKL-20 | pDKL-32 | pDKL-44 |
| 1.11 | | | | | | | | | K | | | | pDKL-21 | pDKL-33 | pDKL-45 |
| 1.12 | | | | | | | L | | | | | | pDKL-22 | pDKL-34 | pDKL-46 |
| 1.13 | | | | | | M | | | | | | | pDKL-47 | pDKL-55 | pDKL-63 |
| 1.14 | | | | | H | | | | | | | | pDKL-48 | pDKL-56 | pDKL-64 |
| 1.15 | | | | C | | | | | | | | | pDKL-49 | pDKL-57 | pDKL-65 |
| 1.16 | | | | | | | | | | | | | pDKL-50 | pDKL-58 | pDKL-66 |
| 1.17 | T | | | | | | | | | E | | | pDKL-51 | pDKL-59 | pDKL-67 |
| 1.18 | | | | | | | | | | | | | pDKL-52 | pDKL-60 | pDKL-68 |
| 1.19 | | | | | | | | | | | | | pDKL-53 | pDKL-61 | pDKL-69 |
| 1.20 | | | | | | | | | | | | P | pDKL-54 | pDKL-62 | pDKL-70 |

TABLE 6.2B
Rationally Designed Candidate Editors (CABE-2s; T_{AD}AC-
2s). Mutations are indicated with reference to TadA*8.20.

| | Position No. | | | | | | | | | |
|---|---|---|---|---|---|---|---|---|---|---|
| | 27 | 29 | 30 | 49 | 82 | 84 | 107 | 112 | 115 | 142 |
| | TadA*8.20 | | | | | | | | | |
| | E | P | V | I | S | F | R | G | G | A |
| | Alterations Evaluated | | | | | | | | | |
| | G/S/H | G/A/K | I/L/F | K | T | L/A | C | H | M | E |
| S1.1 | S | | | K | T | | | | | |
| S1.2 | S | | | K | T | | C | | | |
| S1.3 | S | | | K | T | | | H | | |
| S1.4 | S | | | K | T | | | | M | |
| S1.5 | S | | | K | T | | | | | E |
| S1.6 | S | | | K | T | | C | H | | |
| S1.7 | S | | | K | T | | C | | M | |
| S1.8 | S | | | K | T | | C | | | E |
| S1.9 | S | | | K | T | | | H | | E |
| S1.10 | S | | | K | T | | | | M | E |
| S1.11 | S | | | K | T | | C | H | M | E |
| S1.12 | S | | I | K | T | | | | | |
| S1.13 | S | | I | K | T | | C | | | |
| S1.14 | S | | I | K | T | | | H | | |
| S1.15 | S | | I | K | T | | | | M | |
| S1.16 | S | | I | K | T | | | | | E |
| S1.17 | S | | I | K | T | | C | H | | |
| S1.18 | S | | I | K | T | | C | | M | |
| S1.19 | S | | I | K | T | | C | | | E |
| S1.20 | S | | I | K | T | | | H | | E |
| S1.21 | S | | I | K | T | | | | M | E |
| S1.22 | S | | I | K | T | | C | H | M | E |
| S1.23 | S | | L | K | T | | | | | |
| S1.24 | S | | L | K | T | | C | | | |
| S1.25 | S | | L | K | T | | | H | | |
| S1.26 | S | | L | K | T | | | | M | |
| S1.27 | S | | L | K | T | | | | | E |
| S1.28 | S | | L | K | T | | C | H | | |
| S1.29 | S | | L | K | T | | C | | M | |
| S1.30 | S | | L | K | T | | C | | | E |
| S1.31 | S | | L | K | T | | | H | | E |
| S1.32 | S | | L | K | T | | | | M | E |
| S1.33 | S | | L | K | T | | C | H | M | E |
| S1.34 | S | | F | K | T | A | | | | |
| S1.35 | S | | F | K | T | A | C | | | |
| S1.36 | S | | F | K | T | A | | H | | |
| S1.37 | S | | F | K | T | A | | | M | |
| S1.38 | S | | F | K | T | A | | | | E |
| S1.39 | S | | F | K | T | A | C | H | | |
| S1.40 | S | | F | K | T | A | C | | M | |
| S1.41 | S | | F | K | T | A | C | | | E |
| S1.42 | S | | F | K | T | A | | H | | E |
| S1.43 | S | | F | K | T | A | | | M | E |
| S1.44 | S | | F | K | T | A | C | H | M | E |
| S1.45 | S | | | K | T | L | | | | |
| S1.46 | S | | | K | T | L | C | | | |
| S1.47 | S | | | K | T | L | | H | | |
| S1.48 | S | | | K | T | L | | | M | |
| S1.49 | S | | | K | T | L | | | | E |
| S1.50 | S | | | K | T | L | C | H | | |
| S1.51 | S | | | K | T | L | C | | M | |
| S1.52 | S | | | K | T | L | C | | | E |
| S1.53 | S | | | K | T | L | | H | | E |
| S1.54 | S | | | K | T | L | | | M | E |
| S1.55 | S | | | K | T | L | C | H | M | E |
| S1.56 | S | | I | K | T | L | | | | |
| S1.57 | S | | I | K | T | L | C | | | |
| S1.58 | S | | I | K | T | L | | H | | |
| S1.59 | S | | I | K | T | L | | | M | |
| S1.60 | S | | I | K | T | L | | | | E |
| S1.61 | S | | I | K | T | L | C | H | | |
| S1.62 | S | | I | K | T | L | C | | M | |
| S1.63 | S | | I | K | T | L | C | | | E |
| S1.64 | S | | I | K | T | L | | H | | E |
| S1.65 | S | | I | K | T | L | | | M | E |
| S1.66 | S | | I | K | T | L | C | H | M | E |
| S1.67 | S | G | | K | T | | | | | |
| S1.68 | S | G | | K | T | | C | | | |
| S1.69 | S | G | | K | T | | | H | | |
| S1.70 | S | G | | K | T | | | | M | |
| S1.71 | S | G | | K | T | | | | | E |
| S1.72 | S | G | | K | T | | C | H | | |
| S1.73 | S | G | | K | T | | C | | M | |
| S1.74 | S | G | | K | T | | C | | | E |
| S1.75 | S | G | | K | T | | | H | | E |
| S1.76 | S | G | | K | T | | | | M | E |
| S1.77 | S | G | | K | T | | C | H | M | E |
| S1.78 | | G | | K | T | | | | | |
| S1.79 | | G | | K | T | | C | | | |
| S1.80 | | G | | K | T | | | H | | |
| S1.81 | | G | | K | T | | | | M | |
| S1.82 | | G | | K | T | | | | | E |
| S1.83 | | G | | K | T | | C | H | | |
| S1.84 | | G | | K | T | | C | | M | |
| S1.85 | | G | | K | T | | C | | | E |
| S1.86 | | G | | K | T | | | H | | E |
| S1.87 | | G | | K | T | | | | M | E |
| S1.88 | | G | | K | T | | C | H | M | E |
| S1.89 | | K | | K | T | | | | | |
| S1.90 | | K | | K | T | | C | | | |
| S1.91 | | K | | K | T | | | H | | |
| S1.92 | | K | | K | T | | | | M | |
| S1.93 | | K | | K | T | | | | | E |
| S1.94 | | K | | K | T | | C | H | | |
| S1.95 | | K | | K | T | | C | | M | |
| S1.96 | | K | | K | T | | C | | | E |
| S1.97 | | K | | K | T | | | H | | E |
| S1.98 | | K | | K | T | | | | M | E |
| S1.99 | | K | | K | T | | C | H | M | E |
| S1.100 | | K | I | K | T | | | | | |
| S1.101 | | K | I | K | T | | C | | | |
| S1.102 | | K | I | K | T | | | H | | |
| S1.103 | | K | I | K | T | | | | M | |
| S1.104 | | K | I | K | T | | | | | E |
| S1.105 | | K | I | K | T | | C | H | | |
| S1.106 | | K | I | K | T | | C | | M | |
| S1.107 | | K | I | K | T | | C | | | E |
| S1.108 | | K | I | K | T | | | H | | E |
| S1.109 | | K | I | K | T | | | | M | E |
| S1.110 | | K | I | K | T | | C | H | M | E |
| S1.111 | | K | | K | T | L | | | | |
| S1.112 | | K | | K | T | L | C | | | |
| S1.113 | | K | | K | T | L | | H | | |
| S1.114 | | K | | K | T | L | | | M | |
| S1.115 | | K | | K | T | L | | | | E |
| S1.116 | | K | | K | T | L | C | H | | |
| S1.117 | | K | | K | T | L | C | | M | |
| S1.118 | | K | | K | T | L | C | | | E |
| S1.119 | | K | | K | T | L | | H | | E |
| S1.120 | | K | | K | T | L | | | M | E |
| S1.121 | | K | | K | T | L | C | H | M | E |
| S1.122 | | K | I | K | T | L | | | | |
| S1.123 | | K | I | K | T | L | C | | | |
| S1.124 | | K | I | K | T | L | | H | | |
| S1.125 | | K | I | K | T | L | | | M | |
| S1.126 | | K | I | K | T | L | | | | E |
| S1.127 | | K | I | K | T | L | C | H | | |
| S1.128 | | K | I | K | T | L | C | | M | |
| S1.129 | | K | I | K | T | L | C | | | E |
| S1.130 | | K | I | K | T | L | | H | | E |
| S1.131 | | K | I | K | T | L | | | M | E |
| S1.132 | | K | I | K | T | L | C | H | M | E |
| S1.133 | G | | | K | T | | | | | |
| S1.134 | G | | | K | T | | C | | | |
| S1.135 | G | | | K | T | | | H | | |
| S1.136 | G | | | K | T | | | | M | |
| S1.137 | G | | | K | T | | | | | E |
| S1.138 | G | | | K | T | | C | H | | |
| S1.139 | G | | | K | T | | C | | M | |
| S1.140 | G | | | K | T | | C | | | E |
| S1.141 | G | | | K | T | | | H | | E |
| S1.142 | G | | | K | T | | | | M | E |
| S1.143 | G | | | K | T | | C | H | M | E |
| S1.144 | H | | | K | T | | | | | |
| S1.145 | H | | | K | T | | C | | | |
| S1.146 | H | | | K | T | | | H | | |
| S1.147 | H | | | K | T | | | | M | |
| S1.148 | H | | | K | T | | | | | E |
| S1.149 | H | | | K | T | | C | H | | |
| S1.150 | H | | | K | T | | C | | M | |
| S1.151 | H | | | K | T | | C | | | E |
| S1.152 | H | | | K | T | | | H | | E |
| S1.153 | H | | | K | T | | | | M | E |
| S1.154 | H | | | K | T | | C | H | M | E |
| S1.155 | S | | | | T | | | | | |
| S1.156 | S | | | | T | | C | | | |
| S1.157 | S | | | | T | | | H | | |
| S1.158 | S | | | | T | | | | M | |
| S1.159 | S | | | | T | | | | | E |
| S1.160 | S | | | | T | | C | H | | |
| S1.161 | S | | | | T | | C | | M | |
| S1.162 | S | | | | T | | C | | | E |
| S1.163 | S | | | | T | | | H | | E |
| S1.164 | S | | | | T | | | | M | E |
| S1.165 | S | | | | T | | C | H | M | E |
| S1.166 | | A | | | T | | | | | |
| S1.167 | | A | | | T | | C | | | |
| S1.168 | | A | | | T | | | H | | |
| S1.169 | | A | | | T | | | | M | |
| S1.170 | | A | | | T | | | | | E |
| S1.171 | | A | | | T | | C | H | | |
| S1.172 | | A | | | T | | C | | M | |
| S1.173 | | A | | | T | | C | | | E |
| S1.174 | | A | | | T | | | H | | E |
| S1.175 | | A | | | T | | | | M | E |
| S1.176 | | A | | | T | | C | H | M | E |
| S1.177 | S | | I | | T | | | | | |
| S1.178 | S | | I | | T | | C | | | |
| S1.179 | S | | I | | T | | | H | | |
| S1.180 | S | | I | | T | | | | M | |
| S1.181 | S | | I | | T | | | | | E |
| S1.182 | S | | I | | T | | C | H | | |
| S1.183 | S | | I | | T | | C | | M | |
| S1.184 | S | | I | | T | | C | | | E |
| S1.185 | S | | I | | T | | | H | | E |
| S1.186 | S | | I | | T | | | | M | E |
| S1.187 | S | | I | | T | | C | H | M | E |
| S1.188 | | A | I | | T | L | | | | |
| S1.189 | | A | I | | T | L | C | | | |
| S1.190 | | A | I | | T | L | | H | | |
| S1.191 | | A | I | | T | L | | | M | |
| S1.192 | | A | I | | T | L | | | | E |
| S1.193 | | A | I | | T | L | C | H | | |
| S1.194 | | A | I | | T | L | C | | M | |
| S1.195 | | A | I | | T | L | C | | | E |
| S1.196 | | A | I | | T | L | | H | | E |
| S1.197 | | A | I | | T | L | | | M | E |
| S1.198 | | A | I | | T | L | C | H | M | E |
| S1.199 | S | A | L | K | T | L | C | H | M | E |

TABLE 6.2C
Candidate base editors (CABE-2e; T_{AD}AC-2e). Mutations are indicated with reference to variant 1.2 (Table 6.2A).

| Variant | Alternative Variant | Residue identity (START Met is amino acid #1) | | | | | | | | | | | | | | | | | |
|---|---|---|---|---|---|---|---|---|---|---|---|---|---|---|---|---|---|---|---|
| Name | Names | 4 | 6 | 17 | 23 | 76 | 77 | 100 | 111 | 114 | 119 | 122 | 127 | 143 | 147 | 158 | 159 | 162 | 166 |
| Reference | 1.2 (see Table 1A) | V | F | T | R | I | D | G | T | A | D | H | N | A | R | A | Q | A | T |
| TadAC2.1 | pDKL-135; 2.1 | K | | | | | | | | C | | | | | | | | | |
| TadAC2.2 | pDKL-136; 2.2 | K | | | | | G | | | | | | | | | | | | |
| TadAC2.3 | pDKL-137; 2.3 | | Y | | | | | A | | | | R | | | | | | | |
| TadAC2.4 | pDKL-138; 2.4 | T | | | | R | | | | | | G | | | | | | | |
| TadAC2.5 | pDKL-139; 2.5 | | Y | | | W | | | | | | | | | | | | | |
| TadAC2.6 | pDKL-140; 2.6 | | Y | | | | | | | | N | | | | | | | | |
| TadAC2.7 | pDKL-141; 2.7 | | Y | | | | | | | C | | | | | | | | | |
| TadAC2.8 | pDKL-142; 2.8 | | Y | | | | | | | | | | | | | | | | |
| TadAC2.9 | pDKL-143; 2.9 | K | | | | W | | | | | | T | | | | | | | |
| TadAC2.10 | pDKL-144; 2.10 | | G | | | R | | K | | | | | | | | | | | |
| TadAC2.11 | pDKL-145; 2.11 | | H | | | | | | | | | N | | | | | | | |
| TadAC2.12 | pDKL-146; 2.12 | | | | | | | | | C | | | | | | | | | |
| TadAC2.13 | pDKL-147; 2.13 | | Y | | | H | | | | | | R | | | | | | | I |
| TadAC2.14 | pDKL-148; 2.14 | | | | | | | | | | | | P | | | | | | |
| TadAC2.15 | pDKL-149; 2.15 | | | | Q | R | | | | | | | | | | | | | |
| TadAC2.16 | pDKL-150; 2.16 | | | | | H | | | | | | R | | | | V | | | |
| TadAC2.17 | pDKL-151; 2.17 | | Y | | | | | | H | | | | | | | | | | |
| TadAC2.18 | pDKL-152; 2.18 | | | | | W | | | | | | | | | | | | | |
| TadAC2.19 | pDKL-153; 2.19 | | | | | | | | H | | | G | | | | | | C | |
| TadAC2.20 | pDKL-154; 2.20 | | | | | | | | | | | | | E | | | | | |
| TadAC2.21 | pDKL-155; 2.21 | | Y | | | R | | | | | | | | | | | | | |
| TadAC2.22 | pDKL-156; 2.22 | | | W | | H | | | | | | G | | | | V | | | |
| TadAC2.23 | pDKL-157; 2.23 | S | | | | Y | | | | | | | | E | | | S | | |
| TadAC2.24 | pDKL-158; 2.24 | | | | | | | | | | | | I | | | | | Q | |

TABLE 6.2D
Rationally Designed Candidate Editors (CBE-T1; T_{AD}C-
1). Mutations are indicated with reference to ABE8.20m.

| | AA Positions | | | | | | | | | | | | | | |
|---|---|---|---|---|---|---|---|---|---|---|---|---|---|---|---|
| | 6 | 27 | 49 | 76 | 77 | 82 | 107 | 112 | 114 | 115 | 119 | 122 | 127 | 142 | 143 |
| | TadA8.20 | | | | | | | | | | | | | | |
| | F | E | I | Y | D | S | R | G | A | G | D | H | N | A | A |
| S1.154 | F | H | K | Y | D | T | C | H | | M | | | | E | |
| Alterations | Y | | | W | G | | | | C | | N | G | P | | E |
| S2.1 | Y | H | K | W | | T | C | H | | M | | | | E | |
| S2.2 | Y | H | K | | G | T | C | H | | M | | | | E | |
| S2.3 | Y | H | K | | | T | C | H | C | M | | | | E | |
| S2.4 | Y | H | K | | | T | C | H | | M | N | | | E | |
| S2.5 | Y | H | K | | | T | C | H | | M | | G | | E | |
| S2.6 | Y | H | K | | | T | C | H | | M | | | P | E | |
| S2.7 | Y | H | K | | | T | C | H | | M | | | | E | E |
| S2.8 | Y | H | K | | | T | C | H | | M | | | | A | E |
| S2.9 | Y | H | K | W | G | T | C | H | | M | | | | E | |
| S2.10 | Y | H | K | W | | T | C | H | C | M | | | | E | |
| S2.11 | Y | H | K | W | | T | C | H | | M | N | | | E | |
| S2.12 | Y | H | K | W | | T | C | H | | M | | G | | E | |
| S2.13 | Y | H | K | W | | T | C | H | | M | | | P | E | |
| S2.14 | Y | H | K | W | | T | C | H | | M | | | | E | E |
| S2.15 | Y | H | K | W | | T | C | H | | M | | | | A | E |
| S2.16 | Y | H | K | | G | T | C | H | C | M | | | | E | |
| S2.17 | Y | H | K | | G | T | C | H | | M | N | | | E | |
| S2.18 | Y | H | K | | G | T | C | H | | M | | G | | E | |
| S2.19 | Y | H | K | | G | T | C | H | | M | | | P | E | |
| S2.20 | Y | H | K | | G | T | C | H | | M | | | | E | E |
| S2.21 | Y | H | K | | G | T | C | H | | M | | | | A | E |
| S2.22 | Y | H | K | | | T | C | H | C | M | N | | | E | |
| S2.23 | Y | H | K | | | T | C | H | C | M | | G | | E | |
| S2.24 | Y | H | K | | | T | C | H | C | M | | | P | E | |
| S2.25 | Y | H | K | | | T | C | H | | M | N | G | | E | |
| S2.26 | Y | H | K | | | T | C | H | | M | N | | P | E | |
| S2.27 | Y | H | K | | | T | C | H | | M | | G | P | E | |
| S2.28 | Y | H | K | W | G | T | C | H | C | M | | | | E | |
| S2.29 | Y | H | K | W | G | T | C | H | | M | N | | | E | |
| S2.30 | Y | H | K | W | G | T | C | H | | M | | G | | E | |
| S2.31 | Y | H | K | W | G | T | C | H | | M | | | P | E | |
| S2.32 | Y | H | K | W | G | T | C | H | | M | | | | E | E |
| S2.33 | Y | H | K | W | G | T | C | H | | M | | | | A | E |
| S2.34 | Y | H | K | W | | T | C | H | C | M | N | | | E | |
| S2.35 | Y | H | K | W | | T | C | H | C | M | | G | | E | |
| S2.36 | Y | H | K | W | | T | C | H | C | M | | | P | E | |
| S2.37 | Y | H | K | W | | T | C | H | C | M | | | | E | E |
| S2.38 | Y | H | K | W | | T | C | H | C | M | | | | A | E |
| S2.39 | Y | H | K | W | | T | C | H | | M | N | G | | E | |
| S2.40 | Y | H | K | W | | T | C | H | | M | N | | P | E | |
| S2.41 | Y | H | K | W | | T | C | H | | M | | G | P | E | |
| S2.42 | Y | H | K | W | | T | C | H | C | M | N | G | | E | |
| S2.43 | Y | H | K | W | | T | C | H | C | M | N | | P | E | |
| S2.44 | Y | H | K | W | | T | C | H | C | M | | G | P | E | |
| S2.45 | Y | H | K | W | G | T | C | H | C | M | N | | | E | |
| S2.46 | Y | H | K | W | G | T | C | H | C | M | | G | | E | |
| S2.47 | Y | H | K | W | G | T | C | H | C | M | | | P | E | |
| S2.48 | Y | H | K | W | G | T | C | H | C | M | | | | E | E |
| S2.49 | Y | H | K | W | G | T | C | H | C | M | | | | A | E |
| S2.50 | Y | H | K | W | G | T | C | H | C | M | N | G | | E | |
| S2.51 | Y | H | K | W | G | T | C | H | C | M | N | | P | E | |
| S2.52 | Y | H | K | W | G | T | C | H | C | M | | G | P | E | |
| S2.53 | Y | H | K | W | | T | C | H | C | M | N | G | P | E | E |
| S2.54 | Y | H | K | W | | T | C | H | C | M | N | G | P | A | E |
| S2.55 | Y | H | K | W | G | T | C | H | C | M | N | G | P | E | E |
| S2.56 | Y | H | K | W | G | T | C | H | C | M | N | G | P | A | E |

TABLE 6.2E
Hybrid constructs. Mutations are indicated with reference to ABE7.10.

| | TadA amino acid subsitutions | | | | | | | | | | | |
|---|---|---|---|---|---|---|---|---|---|---|---|---|
| | 76 | 82 | 109 | 111 | 119 | 122 | 123 | 147 | 149 | 154 | 166 | 167 |
| ABE7.10 | I | V | A | T | D | H | Y | Y | F | Q | T | D |
| ABE8e | | | S | R | N | N | | D | Y | | I | N |
| ABE8.20 | Y | S | | | | | H | R | | R | | |
| ABE8.17 | | S | | | | | | | | R | | |
| pNMG- | Y | S | | | | | H | D | | R | | |
| B878 | | | | | | | | | | | | |
| pNMG- | Y | S | | | | | H | R | Y | R | | |
| B879 | | | | | | | | | | | | |
| pNMG- | Y | S | | | | | H | R | | R | I | |
| B880 | | | | | | | | | | | | |
| pNMG- | Y | S | | | | | H | R | | R | | N |
| B881 | | | | | | | | | | | | |
| pNMG- | Y | S | | | | | H | D | Y | R | I | N |
| B882 | | | | | | | | | | | | |
| pNMG- | Y | S | | R | N | | H | R | | R | | |
| B883 | | | | | | | | | | | | |
| pNMG- | Y | S | S | R | N | N | H | R | | R | | |
| B884 | | | | | | | | | | | | |
| pNMG- | Y | S | S | | | | H | R | | R | | |
| B885 | | | | | | | | | | | | |
| pNMG- | Y | S | | R | | | H | R | | R | | |
| B886 | | | | | | | | | | | | |
| pNMG- | Y | S | | | N | | H | R | | R | | |
| B887 | | | | | | | | | | | | |
| pNMG- | Y | S | | | | N | H | R | | R | | |
| B888 | | | | | | | | | | | | |
| pNMG- | Y | S | S | R | | | H | R | | R | | |
| B889 | | | | | | | | | | | | |
| ABE7.10 | I | V | A | T | D | H | Y | Y | F | Q | T | D |
| ABE8e | | | S | R | N | N | | D | Y | | I | N |
| ABE8.20 | Y | S | | | | | H | R | | R | | |
| ABE8.17 | | S | | | | | | | | R | | |
| pNMG- | Y | S | | | N | N | H | R | | R | | |
| B890 | | | | | | | | | | | | |
| pNMG- | Y | S | S | R | N | N | H | D | Y | R | I | N |
| B891 | | | | | | | | | | | | |

TABLE 6.2F
Base editor variants. Mutations are indicated with reference to ABE8.19m/8.20m.

| AA positions: | 17 | 27 | 48 | 49 | 76 | 82 | 84 | 118 | 142 | 147 | 149 | 166 | 167 |
|---|---|---|---|---|---|---|---|---|---|---|---|---|---|
| ABE8.19m/8.20m | T | E | A | I | Y/I | S | F | M | A | Y | F | T | D |
| 1.1 + 8e(B879) | | H | | | I | | M | | | | Y | | |
| 1.2 + 8e(B879) | | H | | K | I | | | | | | Y | | |
| 1.12 + 8e(B879) | A | H | | M | I | | | L | | | Y | | |
| 1.17 + 8e(B879) | A | | G | | | T | | | E | | Y | | |
| 1.18 + 8e(B879) | | G | | | | | | | | | Y | | |
| 1.19 + 8e(B879) | | G | | N | | | | | | | Y | | |
| 1.1 + 8e(B882) | | H | | | I | | M | | | D | Y | I | N |
| 1.2 + 8e(B882) | | H | | K | I | | | | | D | Y | I | N |
| 1.12 + 8e(B882) | A | H | | M | I | | | L | | D | Y | I | N |
| 1.17 + 8e(B882) | A | | G | | | T | | | E | D | Y | I | N |
| 1.18 + 8e(B882) | | G | | | | | | | | D | Y | I | N |
| 1.19 + 8e(B882) | | G | | N | | | | | | D | Y | I | N |

### Guide Polynucleotides

[0625] A polynucleotide programmable nucleotide binding domain, when in conjunction with a bound guide polynucleotide (e.g., gRNA), can specifically bind to a target polynucleotide sequence (i.e., via complementary base pairing between bases of the bound guide nucleic acid and bases of the target polynucleotide sequence) and thereby localize the base editor to the target nucleic acid sequence desired to be edited. In some embodiments, the target polynucleotide sequence comprises single-stranded DNA or double-stranded DNA. In some embodiments, the target polynucleotide sequence comprises RNA. In some embodiments, the target polynucleotide sequence comprises a DNA-RNA hybrid.

[0626] CRISPR is an adaptive immune system that provides protection against mobile genetic elements (viruses, transposable elements and conjugative plasmids). CRISPR clusters contain spacers, sequences complementary to antecedent mobile elements, and target invading nucleic acids. CRISPR clusters are transcribed and processed into CRISPR RNA (crRNA). In type II CRISPR systems, correct processing of pre-crRNA requires a trans-encoded small RNA (tracrRNA), endogenous ribonuclease 3 (rnc) and a Cas9 protein. The tracrRNA serves as a guide for ribonuclease 3-aided processing of pre-crRNA. Subsequently, Cas9/crRNA/tracrRNA endonucleolytically cleaves linear or circular dsDNA target complementary to the spacer. The target strand not complementary to crRNA is first cut endonucleolytically, and then trimmed 3′-5′ exonucleolytically. In nature, DNA-binding and cleavage typically requires protein and both RNAs. However, single guide RNAs (“sgRNA”, or simply “gRNA”) can be engineered so as to incorporate aspects of both the crRNA and tracrRNA into a single RNA species. See, e.g., Jinek M., et al. Science 337:816-821(2012), the entire contents of which is hereby incorporated by reference. Cas9 recognizes a short motif in the CRISPR repeat sequences (the PAM or protospacer adjacent motif) to help distinguish self versus non-self. See e.g., “Complete genome sequence of an M1 strain of Streptococcus pyogenes.” Ferretti, J. J. et al., Natl. Acad. Sci. U.S.A. 98:4658-4663(2001); “CRISPR RNA maturation by trans-encoded small RNA and host factor RNase III.” Deltcheva E. et al., Nature 471:602-607(2011); and “Programmable dual-RNA-guided DNA endonuclease in adaptive bacterial immunity.” Jinek M. et al, Science 337:816-821(2012), the entire contents of each of which are incorporated herein by reference).

[0627] The PAM sequence can be any PAM sequence known in the art. Suitable PAM sequences include, but are not limited to, NGG, NGA, NGC, NGN, NGT, NGCG, NGAG, NGAN, NGNG, NGCN, NGCG, NGTN, NNGRRT, NNNRRT, NNGRR(N), TTTV, TYCV, TYCV, TATV, NNNNGATT, NNAGAAW, or NAAAAC. Y is a pyrimidine; N is any nucleotide base; W is A or T.

[0628] In an embodiment, a guide polynucleotide described herein can be RNA or DNA. In one embodiment, the guide polynucleotide is a guide RNA (gRNA). Exemplary guide RNAs spacer sequences are provided in Tables 1A and 1B. An RNA/Cas complex can assist in “guiding” a Cas protein to a target DNA. Cas9/crRNA/tracrRNA endonucleolytically cleaves linear or circular dsDNA target complementary to the spacer. The target strand not complementary to crRNA is first cut endonucleolytically, then trimmed 3′-5′ exonucleolytically. In nature, DNA-binding and cleavage typically requires protein and both RNAs. However, single guide RNAs (“sgRNA”, or simply “gRNA”) can be engineered so as to incorporate aspects of both the crRNA and tracrRNA into a single RNA species. See, e.g., Jinek M. et al., Science 337:816-821(2012), the entire contents of which is hereby incorporated by reference.

[0629] In some embodiments, the guide polynucleotide is at least one single guide RNA (“sgRNA” or “gRNA”). In some embodiments, a guide polynucleotide comprises two or more individual polynucleotides, which can interact with one another via for example complementary base pairing (e.g., a dual guide polynucleotide, dual gRNA). For example, a guide polynucleotide can comprise a CRISPR RNA (crRNA) and a trans-activating CRISPR RNA (tracrRNA) or can comprise one or more trans-activating CRISPR RNA (tracrRNA).

[0630] In some embodiments, the guide polynucleotide is at least one tracrRNA. In some embodiments, the guide polynucleotide does not require PAM sequence to guide the polynucleotide-programmable DNA-binding domain (e.g., Cas9 or Cpf1) to the target nucleotide sequence.

[0631] A guide polynucleotide may include natural or non-natural (or unnatural) nucleotides (e.g., peptide nucleic acid or nucleotide analogs). In some cases, the targeting region of a guide nucleic acid sequence can be at least 15, 16, 17, 18, 19, 20, 21, 22, 23, 24, 25, 26, 27, 28, 29, or 30 nucleotides in length. A targeting region of a guide nucleic acid can be between 10-30 nucleotides in length, or between 15-25 nucleotides in length, or between 15-20 nucleotides in length.

[0632] In some embodiments, the base editor provided herein utilizes one or more guide polynucleotide (e.g., multiple gRNA). In some embodiments, a single guide polynucleotide is utilized for different base editors described herein. For example, a single guide polynucleotide can be utilized for a cytidine base editor and an adenosine base editor.

[0633] In some embodiments, the methods described herein can utilize an engineered Cas protein. A guide RNA (gRNA) is a short synthetic RNA composed of a scaffold sequence necessary for Cas-binding and a user-defined ˜20 nucleotide spacer that defines the genomic target to be modified. Exemplary gRNA scaffold sequences are provided in the sequence listing as SEQ ID NOs: 317-327. Thus, a skilled artisan can change the genomic target of the Cas protein specificity is partially determined by how specific the gRNA targeting sequence is for the genomic target compared to the rest of the genome.

[0634] In other embodiments, a guide polynucleotide can comprise both the polynucleotide targeting portion of the nucleic acid and the scaffold portion of the nucleic acid in a single molecule (i.e., a single-molecule guide nucleic acid). For example, a single-molecule guide polynucleotide can be a single guide RNA (sgRNA or gRNA). Herein the term guide polynucleotide sequence contemplates any single, dual or multi-molecule nucleic acid capable of interacting with and directing a base editor to a target polynucleotide sequence.

[0635] Typically, a guide polynucleotide (e.g., crRNA/trRNA complex or a gRNA) comprises a “polynucleotide-targeting segment” that includes a sequence capable of recognizing and binding to a target polynucleotide sequence, and a “protein-binding segment” that stabilizes the guide polynucleotide within a polynucleotide programmable nucleotide binding domain component of a base editor. In some embodiments, the polynucleotide targeting segment of the guide polynucleotide recognizes and binds to a DNA polynucleotide, thereby facilitating the editing of a base in DNA. In other cases, the polynucleotide targeting segment of the guide polynucleotide recognizes and binds to an RNA polynucleotide, thereby facilitating the editing of a base in RNA. Herein a “segment” refers to a section or region of a molecule, e.g., a contiguous stretch of nucleotides in the guide polynucleotide. A segment can also refer to a region/section of a complex such that a segment can comprise regions of more than one molecule. For example, where a guide polynucleotide comprises multiple nucleic acid molecules, the protein-binding segment of can include all or a portion of multiple separate molecules that are for instance hybridized along a region of complementarity. In some embodiments, a protein-binding segment of a DNA-targeting RNA that comprises two separate molecules can comprise (i) base pairs 40-75 of a first RNA molecule that is 100 base pairs in length; and (ii) base pairs 10-25 of a second RNA molecule that is 50 base pairs in length. The definition of “segment,” unless otherwise specifically defined in a particular context, is not limited to a specific number of total base pairs, is not limited to any particular number of base pairs from a given RNA molecule, is not limited to a particular number of separate molecules within a complex, and can include regions of RNA molecules that are of any total length and can include regions with complementarity to other molecules.

[0636] The guide polynucleotides can be synthesized chemically, synthesized enzymatically, or a combination thereof. For example, the gRNA can be synthesized using standard phosphoramidite-based solid-phase synthesis methods. Alternatively, the gRNA can be synthesized in vitro by operably linking DNA encoding the gRNA to a promoter control sequence that is recognized by a phage RNA polymerase. Examples of suitable phage promoter sequences include T7, T3, SP6 promoter sequences, or variations thereof. In embodiments in which the gRNA comprises two separate molecules (e.g., crRNA and tracrRNA), the crRNA can be chemically synthesized and the tracrRNA can be enzymatically synthesized.

[0637] A guide polynucleotide may be expressed, for example, by a DNA that encodes the gRNA, e.g., a DNA vector comprising a sequence encoding the gRNA. The gRNA may be encoded alone or together with an encoded base editor. Such DNA sequences may be introduced into an expression system, e.g., a cell, together or separately. For example, DNA sequences encoding a polynucleotide programmable nucleotide binding domain and a gRNA may be introduced into a cell, each DNA sequence can be part of a separate molecule (e.g., one vector containing the polynucleotide programmable nucleotide binding domain coding sequence and a second vector containing the gRNA coding sequence) or both can be part of a same molecule (e.g., one vector containing coding (and regulatory) sequence for both the polynucleotide programmable nucleotide binding domain and the gRNA). An RNA can be transcribed from a synthetic DNA molecule, e.g., a gBlocks® gene fragment. A gRNA molecule can be transcribed in vitro.

[0638] A gRNA or a guide polynucleotide can comprise three regions: a first region at the 5′ end that can be complementary to a target site in a chromosomal sequence, a second internal region that can form a stem loop structure, and a third 3′ region that can be single-stranded. A first region of each gRNA can also be different such that each gRNA guides a fusion protein to a specific target site. Further, second and third regions of each gRNA can be identical in all gRNAs.

[0639] A first region of a gRNA or a guide polynucleotide can be complementary to sequence at a target site in a chromosomal sequence such that the first region of the gRNA can base pair with the target site. In some cases, a first region of a gRNA can comprise from or from about 10 nucleotides to 25 nucleotides (i.e., from 10 nucleotides to nucleotides; or from about 10 nucleotides to about 25 nucleotides; or from 10 nucleotides to about 25 nucleotides; or from about 10 nucleotides to 25 nucleotides) or more. For example, a region of base pairing between a first region of a gRNA and a target site in a chromosomal sequence can be or can be about 10, 11, 12, 13, 14, 15, 16, 17, 18, 19, 20, 22, 23, 24, 25, or more nucleotides in length. Sometimes, a first region of a gRNA can be or can be about 19, 20, or 21 nucleotides in length.

[0640] A gRNA or a guide polynucleotide can also comprise a second region that forms a secondary structure. For example, a secondary structure formed by a gRNA can comprise a stem (or hairpin) and a loop. A length of a loop and a stem can vary. For example, a loop can range from or from about 3 to 10 nucleotides in length, and a stem can range from or from about 6 to 20 base pairs in length. A stem can comprise one or more bulges of 1 to 10 or about 10 nucleotides. The overall length of a second region can range from or from about 16 to 60 nucleotides in length. For example, a loop can be or can be about 4 nucleotides in length and a stem can be or can be about 12 base pairs.

[0641] A gRNA or a guide polynucleotide can also comprise a third region at the 3′ end that can be essentially single-stranded. For example, a third region is sometimes not complementarity to any chromosomal sequence in a cell of interest and is sometimes not complementarity to the rest of a gRNA. Further, the length of a third region can vary. A third region can be more than or more than about 4 nucleotides in length. For example, the length of a third region can range from or from about 5 to 60 nucleotides in length.

[0642] A gRNA or a guide polynucleotide can target any exon or intron of a gene target. In some cases, a guide can target exon 1 or 2 of a gene, in other cases; a guide can target exon 3 or 4 of a gene. In some embodiments, a composition comprises multiple gRNAs that all target the same exon or multiple gRNAs that target different exons. An exon and/or an intron of a gene can be targeted.

[0643] A gRNA or a guide polynucleotide can target a nucleic acid sequence of about 20 nucleotides or less than about 20 nucleotides (e.g., at least about 5, 10, 15, 16, 17, 18, 19, 20, 21, 22, 23, 24, 25, 30 nucleotides), or anywhere between about 1-100 nucleotides (e.g., 5, 10, 15, 16, 17, 18, 19, 20, 21, 22, 23, 24, 25, 30, 40, 50, 60, 70, 80, 90, 100). A target nucleic acid sequence can be or can be about 20 bases immediately 5′ of the first nucleotide of the PAM. A gRNA can target a nucleic acid sequence. A target nucleic acid can be at least or at least about 1-10, 1-20, 1-30, 1-40, 1-50, 1-60, 1-70, 1-80, 1-90, or 1-100 nucleotides.

[0644] Methods for selecting, designing, and validating guide polynucleotides, e.g., gRNAs and targeting sequences are described herein and known to those skilled in the art. For example, to minimize the impact of potential substrate promiscuity of a deaminase domain in the nucleobase editor system (e.g., an AID domain), the number of residues that could unintentionally be targeted for deamination (e.g., off-target C residues that could potentially reside on single strand DNA within the target nucleic acid locus) may be minimized. In addition, software tools can be used to optimize the gRNAs corresponding to a target nucleic acid sequence, e.g., to minimize total off-target activity across the genome. For example, for each possible targeting domain choice using S. pyogenes Cas9, all off-target sequences (preceding selected PAMs, e.g., NAG or NGG) may be identified across the genome that contain up to certain number (e.g., 1, 2, 3, 4, 5, 6, 7, 8, 9, or 10) of mismatched base-pairs. First regions of gRNAs complementary to a target site can be identified, and all first regions (e.g., crRNAs) can be ranked according to its total predicted off-target score; the top-ranked targeting domains represent those that are likely to have the greatest on-target and the least off-target activity. Candidate targeting gRNAs can be functionally evaluated by using methods known in the art and/or as set forth herein.

[0645] As a non-limiting example, target DNA hybridizing sequences in crRNAs of a gRNA for use with Cas9s may be identified using a DNA sequence searching algorithm. gRNA design is carried out using custom gRNA design software based on the public tool cas-OFFinder as described in Bae S., Park J., & Kim J.-S. Cas-OFFinder: A fast and versatile algorithm that searches for potential off-target sites of Cas9 RNA-guided endonucleases. Bioinformatics 30, 1473-1475 (2014). This software scores guides after calculating their genome-wide off-target propensity. Typically matches ranging from perfect matches to 7 mismatches are considered for guides ranging in length from 17 to 24. Once the off-target sites are computationally-determined, an aggregate score is calculated for each guide and summarized in a tabular output using a web-interface. In addition to identifying potential target sites adjacent to PAM sequences, the software also identifies all PAM adjacent sequences that differ by 1, 2, 3 or more than 3 nucleotides from the selected target sites. Genomic DNA sequences for a target nucleic acid sequence, e.g., a target gene may be obtained and repeat elements may be screened using publicly available tools, for example, the RepeatMasker program. RepeatMasker searches input DNA sequences for repeated elements and regions of low complexity. The output is a detailed annotation of the repeats present in a given query sequence.

[0646] Following identification, first regions of gRNAs, e.g., crRNAs, are ranked into tiers based on their distance to the target site, their orthogonality and presence of 5′ nucleotides for close matches with relevant PAM sequences (for example, a 5′ G based on identification of close matches in the human genome containing a relevant PAM e.g., NGG PAM for S. pyogenes, NNGRRT or NNGRRV PAM for S. aureus). As used herein, orthogonality refers to the number of sequences in the human genome that contain a minimum number of mismatches to the target sequence. A “high level of orthogonality” or “good orthogonality” may, for example, refer to 20-mer targeting domains that have no identical sequences in the human genome besides the intended target, nor any sequences that contain one or two mismatches in the target sequence. Targeting domains with good orthogonality may be selected to minimize off-target DNA cleavage.

[0647] A gRNA can then be introduced into a cell or embryo as an RNA molecule or a non-RNA nucleic acid molecule, e.g., DNA molecule. In one embodiment, a DNA encoding a gRNA is operably linked to promoter control sequence for expression of the gRNA in a cell or embryo of interest. A RNA coding sequence can be operably linked to a promoter sequence that is recognized by RNA polymerase III (Pol III). Plasmid vectors that can be used to express gRNA include, but are not limited to, px330 vectors and px333 vectors. In some cases, a plasmid vector (e.g., px333 vector) can comprise at least two gRNA-encoding DNA sequences. Further, a vector can comprise additional expression control sequences (e.g., enhancer sequences, Kozak sequences, polyadenylation sequences, transcriptional termination sequences, etc.), selectable marker sequences (e.g., GFP or antibiotic resistance genes such as puromycin), origins of replication, and the like. A DNA molecule encoding a gRNA can also be linear. A DNA molecule encoding a gRNA or a guide polynucleotide can also be circular.

[0648] In some embodiments, a reporter system is used for detecting base-editing activity and testing candidate guide polynucleotides. In some embodiments, a reporter system comprises a reporter gene based assay where base editing activity leads to expression of the reporter gene. For example, a reporter system may include a reporter gene comprising a deactivated start codon, e.g., a mutation on the template strand from 3′-TAC-5′ to 3′-CAC-5′. Upon successful deamination of the target C, the corresponding mRNA will be transcribed as 5′-AUG-3′ instead of 5′-GUG-3′, enabling the translation of the reporter gene. Suitable reporter genes will be apparent to those of skill in the art. Non-limiting examples of reporter genes include gene encoding green fluorescence protein (GFP), red fluorescence protein (RFP), luciferase, secreted alkaline phosphatase (SEAP), or any other gene whose expression are detectable and apparent to those skilled in the art. The reporter system can be used to test many different gRNAs, e.g., in order to determine which residue(s) with respect to the target DNA sequence the respective deaminase will target. sgRNAs that target non-template strand can also be tested in order to assess off-target effects of a specific base editing protein, e.g., a Cas9 deaminase fusion protein. In some embodiments, such gRNAs can be designed such that the mutated start codon will not be base-paired with the gRNA. The guide polynucleotides can comprise standard ribonucleotides, modified ribonucleotides (e.g., pseudouridine), ribonucleotide isomers, and/or ribonucleotide analogs. In some embodiments, the guide polynucleotide can comprise at least one detectable label. The detectable label can be a fluorophore (e.g., FAM, TMR, Cy3, Cy5, Texas Red, Oregon Green, Alexa Fluors, Halo tags, or suitable fluorescent dye), a detection tag (e.g., biotin, digoxigenin, and the like), quantum dots, or gold particles.

[0649] In some embodiments, a base editor system may comprise multiple guide polynucleotides, e.g., gRNAs. For example, the gRNAs may target to one or more target loci (e.g., at least 1 gRNA, at least 2 gRNA, at least 5 gRNA, at least 10 gRNA, at least 20 gRNA, at least 30 g RNA, at least 50 gRNA) comprised in a base editor system. The multiple gRNA sequences can be tandemly arranged and are preferably separated by a direct repeat.

### Modified Polynucleotides

[0650] To enhance expression, stability, and/or genomic/base editing efficiency, and/or reduce possible toxicity, the base editor-coding sequence (e.g., mRNA) and/or the guide polynucleotide (e.g., gRNA) can be modified to include one or more modified nucleotides and/or chemical modifications, e.g. using pseudo-uridine, 5-Methyl-cytosine, 2′-O-methyl-3′-phosphonoacetate, 2′-O-methyl thioPACE (MSP), 2′-O-methyl-PACE (MP), 2′-fluoro RNA (2′-F-RNA), =constrained ethyl (S-cEt), 2′-O-methyl (‘M’), 2′-O-methyl-3′-phosphorothioate (‘MS’), 2′-O-methyl-3′-thiophosphonoacetate (‘MSP’), 5-methoxyuridine, phosphorothioate, and N1-Methylpseudouridine. Chemically protected gRNAs can enhance stability and editing efficiency in vivo and ex vivo. Methods for using chemically modified mRNAs and guide RNAs are known in the art and described, for example, by Jiang et al., Chemical modifications of adenine base editor mRNA and guide RNA expand its application scope. Nat Commun 11, 1979 (2020). doi.org/10.1038/s41467-020-15892-8, Callum et al., N1-Methylpseudouridine substitution enhances the performance of synthetic mRNA switches in cells, Nucleic Acids Research, Volume 48, Issue 6, 6 Apr. 2020, Page e35, and Andries et al., Journal of Controlled Release, Volume 217, 10 Nov. 2015, Pages 337-344, each of which is incorporated herein by reference in its entirety.

[0651] In a particular embodiment, the chemical modifications are 2′-O-methyl (2′-OMe) modifications. The modified guide RNAs may improve saCas9 efficacy and also specificity. The effect of an individual modification varies based on the position and combination of chemical modifications used as well as the inter- and intramolecular interactions with other modified nucleotides. By way of example, S-cEt has been used to improve oligonucleotide intramolecular folding.

[0652] In some embodiments, the guide polynucleotide comprises one or more modified nucleotides at the 5′ end and/or the 3′ end of the guide. In some embodiments, the guide polynucleotide comprises two, three, four or more modified nucleosides at the 5′ end and/or the 3′ end of the guide. In some embodiments, the guide polynucleotide comprises two, three, four or more modified nucleosides at the 5′ end and/or the 3′ end of the guide. In some embodiments, the guide polynucleotide comprises four modified nucleosides at the 5′ end and four modified nucleosides at the 3′ end of the guide. In some embodiments, the modified nucleoside comprises a 2′ O-methyl or a phosphorothioate.

[0653] In some embodiments, the guide comprises at least about 50%-75% modified nucleotides. In some embodiments, the guide comprises at least about 85% or more modified nucleotides. In some embodiments, at least about 1-5 nucleotides at the 5′ end of the gRNA are modified and at least about 1-5 nucleotides at the 3′ end of the gRNA are modified. In some embodiments, at least about 3-5 contiguous nucleotides at each of the 5′ and 3′ termini of the gRNA are modified. In some embodiments, at least about 20% of the nucleotides present in a direct repeat or anti-direct repeat are modified. In some embodiments, at least about 50% of the nucleotides present in a direct repeat or anti-direct repeat are modified. In some embodiments, at least about 50-75% of the nucleotides present in a direct repeat or anti-direct repeat are modified. In some embodiments, at least about 100 of the nucleotides present in a direct repeat or anti-direct repeat are modified. In some embodiments, at least about 20% or more of the nucleotides present in a hairpin present in the gRNA scaffold are modified. In some embodiments, at least about 50% or more of the nucleotides present in a hairpin present in the gRNA scaffold are modified. In some embodiments, the guide comprises a variable length protospacer. In some embodiments, the guide comprises a 20-40 nucleotide protospacer. In some embodiments, the guide comprises a protospacer comprising at least about 20-25 nucleotides or at least about 30-35 nucleotides. In some embodiments, the protospacer comprises modified nucleotides. In some embodiments, the guide comprises two or more of the following:
[0654] at least about 1-5 nucleotides at the 5′ end of the gRNA are modified and at least about 1-5 nucleotides at the 3′ end of the gRNA are modified;
[0655] at least about 20% of the nucleotides present in a direct repeat or anti-direct repeat are modified;
[0656] at least about 50-75% of the nucleotides present in a direct repeat or anti-direct repeat are modified;
[0657] at least about 20% or more of the nucleotides present in a hairpin present in the gRNA scaffold are modified;
[0658] a variable length protospacer; and
[0659] a protospacer comprising modified nucleotides.

[0660] In embodiments, the gRNA contains numerous modified nucleotides and/or chemical modifications (“heavy mods”). Such heavy mods can increase base editing ˜2 fold in vivo or in vitro. For such modifications, mN=2′-OMe; Ns=phosphorothioate (PS), where “N” represents the any nucleotide, as would be understood by one having skill in the art. In some cases, a nucleotide (N) may contain two modifications, for example, both a 2′-OMe and a PS modification. For example, a nucleotide with a phosphorothioate and 2′ OMe is denoted as “mNs;” when there are two modifications next to each other, the notation is “mNsmNs.

[0661] In some embodiments of the modified gRNA, the gRNA comprises one or more chemical modifications selected from the group consisting of 2′-O-methyl (2′-OMe), phosphorothioate (PS), 2′-O-methyl thioPACE (MSP), 2′-O-methyl-PACE (MP), 2′-O-methyl thioPACE (MSP), 2′-fluoro RNA (2′-F-RNA), and constrained ethyl (S-cEt). In embodiments, the gRNA comprises 2′-O-methyl or phosphorothioate modifications. In an embodiment, the gRNA comprises 2′-O-methyl and phosphorothioate modifications. In an embodiment, the modifications increase base editing by at least about 2 fold.

[0662] A guide polynucleotide can comprise one or more modifications to provide a nucleic acid with a new or enhanced feature. A guide polynucleotide can comprise a nucleic acid affinity tag. A guide polynucleotide can comprise synthetic nucleotide, synthetic nucleotide analog, nucleotide derivatives, and/or modified nucleotides.

[0663] In some cases, a gRNA or a guide polynucleotide can comprise modifications. A modification can be made at any location of a gRNA or a guide polynucleotide. More than one modification can be made to a single gRNA or a guide polynucleotide. A gRNA or a guide polynucleotide can undergo quality control after a modification. In some cases, quality control can include PAGE, HPLC, MS, or any combination thereof.

[0664] A modification of a gRNA or a guide polynucleotide can be a substitution, insertion, deletion, chemical modification, physical modification, stabilization, purification, or any combination thereof.

[0665] A gRNA or a guide polynucleotide can also be modified by 5′ adenylate, 5′ guanosine-triphosphate cap, 5′ N7-Methylguanosine-triphosphate cap, 5′ triphosphate cap, 3′ phosphate, 3′ thiophosphate, 5′ phosphate, 5′ thiophosphate, Cis-Syn thymidine dimer, trimers, C12 spacer, C3 spacer, C6 spacer, dSpacer, PC spacer, rSpacer, Spacer 18, Spacer 9, 3′-3′ modifications, 2′-O-methyl thioPACE (MSP), 2′-O-methyl-PACE (MP), and constrained ethyl (S-cEt), 5′-5′ modifications, abasic, acridine, azobenzene, biotin, biotin BB, biotin TEG, cholesteryl TEG, desthiobiotin TEG, DNP TEG, DNP-X, DOTA, dT-Biotin, dual biotin, PC biotin, psoralen C2, psoralen C6, TINA, 3′ DABCYL, black hole quencher 1, black hole quencher 2, DABCYL SE, dT-DABCYL, IRDye QC-1, QSY-21, QSY-35, QSY-7, QSY-9, carboxyl linker, thiol linkers, 2′-deoxyribonucleoside analog purine, 2′-deoxyribonucleoside analog pyrimidine, ribonucleoside analog, 2′-O-methyl ribonucleoside analog, sugar modified analogs, wobble/universal bases, fluorescent dye label, 2′-fluoro RNA, 2′-O-methyl RNA, methylphosphonate, phosphodiester DNA, phosphodiester RNA, phosphothioate DNA, phosphorothioate RNA, UNA, pseudouridine-5′-triphosphate, 5′-methylcytidine-5′-triphosphate, or any combination thereof.

[0666] In some cases, a modification is permanent. In other cases, a modification is transient. In some cases, multiple modifications are made to a gRNA or a guide polynucleotide. A gRNA or a guide polynucleotide modification can alter physiochemical properties of a nucleotide, such as their conformation, polarity, hydrophobicity, chemical reactivity, base-pairing interactions, or any combination thereof.

[0667] A guide polynucleotide can be transferred into a cell by transfecting the cell with an isolated gRNA or a plasmid DNA comprising a sequence coding for the guide RNA and a promoter. A gRNA or a guide polynucleotide can also be transferred into a cell in other way, such as using virus-mediated gene delivery. A gRNA or a guide polynucleotide can be isolated. For example, a gRNA can be transfected in the form of an isolated RNA into a cell or organism. A gRNA can be prepared by in vitro transcription using any in vitro transcription system known in the art. A gRNA can be transferred to a cell in the form of isolated RNA rather than in the form of plasmid comprising encoding sequence for a gRNA.

[0668] A modification can also be a phosphorothioate substitute. In some cases, a natural phosphodiester bond can be susceptible to rapid degradation by cellular nucleases and; a modification of internucleotide linkage using phosphorothioate (PS) bond substitutes can be more stable towards hydrolysis by cellular degradation. A modification can increase stability in a gRNA or a guide polynucleotide. A modification can also enhance biological activity. In some cases, a phosphorothioate enhanced RNA gRNA can inhibit RNase A, RNase T1, calf serum nucleases, or any combinations thereof. These properties can allow the use of PS-RNA gRNAs to be used in applications where exposure to nucleases is of high probability in vivo or in vitro. For example, phosphorothioate (PS) bonds can be introduced between the last 3-5 nucleotides at the 5′- or 3′-end of a gRNA which can inhibit exonuclease degradation. In some cases, phosphorothioate bonds can be added throughout an entire gRNA to reduce attack by endonucleases.

[0669] In some embodiments, the guide RNA is designed to disrupt a splice site (i.e., a splice acceptor (SA) or a splice donor (SD). In some embodiments, the guide RNA is designed such that the base editing results in a premature STOP codon.

### Protospacer Adjacent Motif

[0670] The term “protospacer adjacent motif (PAM)” or PAM-like motif refers to a 2-6 base pair DNA sequence immediately following the DNA sequence targeted by the Cas9 nuclease in the CRISPR bacterial adaptive immune system. In some embodiments, the PAM can be a 5′ PAM (i.e., located upstream of the 5′ end of the protospacer). In other embodiments, the PAM can be a 3′ PAM (i.e., located downstream of the 5′ end of the protospacer). The PAM sequence is essential for target binding, but the exact sequence depends on a type of Cas protein. The PAM sequence can be any PAM sequence known in the art. Suitable PAM sequences include, but are not limited to, NGG, NGA, NGC, NGN, NGT, NGTT, NGCG, NGAG, NGAN, NGNG, NGCN, NGCG, NGTN, NNGRRT, NNNRRT, NNGRR(N), TTTV, TYCV, TYCV, TATV, NNNNGATT, NNAGAAW, or NAAAAC. Y is a pyrimidine; N is any nucleotide base; W is A or T.

[0671] A base editor provided herein can comprise a CRISPR protein-derived domain that is capable of binding a nucleotide sequence that contains a canonical or non-canonical protospacer adjacent motif (PAM) sequence. A PAM site is a nucleotide sequence in proximity to a target polynucleotide sequence. Some aspects of the disclosure provide for base editors comprising all or a portion of CRISPR proteins that have different PAM specificities.

[0672] For example, typically Cas9 proteins, such as Cas9 from S. pyogenes (spCas9), require a canonical NGG PAM sequence to bind a particular nucleic acid region, where the “N” in “NGG” is adenine (A), thymine (T), guanine (G), or cytosine (C), and the G is guanine. A PAM can be CRISPR protein-specific and can be different between different base editors comprising different CRISPR protein-derived domains. A PAM can be 5′ or 3′ of a target sequence. A PAM can be upstream or downstream of a target sequence. A PAM can be 1, 2, 3, 4, 5, 6, 7, 8, 9, 10 or more nucleotides in length. Often, a PAM is between 2-6 nucleotides in length.

[0673] In some embodiments, the PAM is an “NRN” PAM where the “N” in “NRN” is adenine (A), thymine (T), guanine (G), or cytosine (C), and the R is adenine (A) or guanine (G); or the PAM is an “NYN” PAM, wherein the “N” in NYN is adenine (A), thymine (T), guanine (G), or cytosine (C), and the Y is cytidine (C) or thymine (T), for example, as described in R. T. Walton et al., 2020, Science, 10.1126/science.aba8853 (2020), the entire contents of which are incorporated herein by reference.

[0674] Several PAM variants are described in Table 7 below.

TABLE 7
Cas9 proteins and corresponding PAM sequences

| Variant | PAM |
|---|---|
| spCas9 | NGG |
| spCas9-VRQR | NGA |
| spCas9-VRER | NGCG |
| xCas9 (sp) | NGN |
| saCas9 | NNGRRT |
| saCas9-KKH | NNNRRT |
| spCas9-MQKSER | NGCG |
| spCas9-MQKSER | NGCN |
| spCas9-LRKIQK | NGTN |
| spCas9-LRVSQK | NGTN |
| spCas9-LRVSQL | NGTN |
| spCas9-MQKFRAER | NGC |
| Cpf1 | 5′ (TTTV) |
| SpyMac | 5′-NAA-3′ |

[0675] In some embodiments, the PAM is NGC. In some embodiments, the NGC PAM is recognized by a Cas9 variant. In some embodiments, the NGC PAM variant includes one or more amino acid substitutions selected from D1135M, S1136Q, G1218K, E1219F, A1322R, D1332A, R1335E, and T1337R (collectively termed “MQKFRAER”).

[0676] In some embodiments, the PAM is NGT. In some embodiments, the NGT PAM is recognized by a Cas9 variant. In some embodiments, the NGT PAM variant is generated through targeted mutations at one or more residues 1335, 1337, 1135, 1136, 1218, and/or 1219. In some embodiments, the NGT PAM variant is created through targeted mutations at one or more residues 1219, 1335, 1337, 1218. In some embodiments, the NGT PAM variant is created through targeted mutations at one or more residues 1135, 1136, 1218, 1219, and 1335. In some embodiments, the NGT PAM variant is selected from the set of targeted mutations provided in Tables 8A and 8B below.

TABLE 8A
NGT PAM Variant Mutations at residues 1219, 1335, 1337, 1218

| Variant | E1219V | R1335Q | T1337 | G1218 |
|---|---|---|---|---|
| 1 | F | V | T | |
| 2 | F | V | R | |
| 3 | F | V | Q | |
| 4 | F | V | L | |
| 5 | F | V | T | R |
| 6 | F | V | R | R |
| 7 | F | V | Q | R |
| 8 | F | V | L | R |
| 9 | L | L | T | |
| 10 | L | L | R | |
| 11 | L | L | Q | |
| 12 | L | L | L | |
| 13 | F | I | T | |
| 14 | F | I | R | |
| 15 | F | I | Q | |
| 16 | F | I | L | |
| 17 | F | G | C | |
| 18 | H | L | N | |
| 19 | F | G | C | A |
| 20 | H | L | N | V |
| 21 | L | A | W | |
| 22 | L | A | F | |
| 23 | L | A | Y | |
| 24 | I | A | W | |
| 25 | I | A | F | |
| 26 | I | A | Y | |

TABLE 8B
NGT PAM Variant Mutations at residues
1135, 1136, 1218, 1219, and 1335

| Variant | D1135L | S1136R | G1218S | E1219V | R1335Q |
|---|---|---|---|---|---|
| 27 | G | | | | |
| 28 | V | | | | |
| 29 | I | | | | |
| 30 | | A | | | |
| 31 | | W | | | |
| 32 | | H | | | |
| 33 | | K | | | |
| 34 | | | K | | |
| 35 | | | R | | |
| 36 | | | Q | | |
| 37 | | | T | | |
| 38 | | | N | | |
| 39 | | | | I | |
| 40 | | | | A | |
| 41 | | | | N | |
| 42 | | | | Q | |
| 43 | | | | G | |
| 44 | | | | L | |
| 45 | | | | S | |
| 46 | | | | T | |
| 47 | | | | | L |
| 48 | | | | | I |
| 49 | | | | | V |
| 50 | | | | | N |
| 51 | | | | | S |
| 52 | | | | | T |
| 53 | | | | | F |
| 54 | | | | | Y |
| 55 | N1286Q | I1331F | | | |

[0677] In some embodiments, the NGT PAM variant is selected from variant 5, 7, 28, 31, or 36 in Table 8A and Table 8B. In some embodiments, the variants have improved NGT PAM recognition.

[0678] In some embodiments, the NGT PAM variants have mutations at residues 1219, 1335, 1337, and/or 1218. In some embodiments, the NGT PAM variant is selected with mutations for improved recognition from the variants provided in Table 9 below.

TABLE 9
NGT PAM Variant Mutations at residues
1219, 1335, 1337, and 1218

| Variant | E1219V | R1335Q | T1337 | G1218 |
|---|---|---|---|---|
| 1 | F | V | T | |
| 2 | F | V | R | |
| 3 | F | V | Q | |
| 4 | F | V | L | |
| 5 | F | V | T | R |
| 6 | F | V | R | R |
| 7 | F | V | Q | R |
| 8 | F | V | L | R |

[0679] In some embodiments, the NGT PAM is selected from the variants provided in Table 10 below.

TABLE 10
NGT PAM variants

| | NGTN | | | | | | | |
|---|---|---|---|---|---|---|---|---|
| | variant | D1135 | S1136 | G1218 | E1219 | A1322R | R1335 | T1337 |
| Variant 1 | LRKIQK | L | R | K | I | — | Q | K |
| Variant 2 | LRSVQK | L | R | S | V | — | Q | K |
| Variant 3 | LRSVQL | L | R | S | V | — | Q | L |
| Variant 4 | LRKIRQK | L | R | K | I | R | Q | K |
| Variant 5 | LRSVRQK | L | R | S | V | R | Q | K |
| Variant 6 | LRSVRQL | L | R | S | V | R | Q | L |

[0680] In some embodiments the NGTN variant is variant 1. In some embodiments, the NGTN variant is variant 2. In some embodiments, the NGTN variant is variant 3. In some embodiments, the NGTN variant is variant 4. In some embodiments, the NGTN variant is variant 5. In some embodiments, the NGTN variant is variant 6.

[0681] In some embodiments, the Cas9 domain is a Cas9 domain from Streptococcus pyogenes (SpCas9). In some embodiments, the SpCas9 domain is a nuclease active SpCas9, a nuclease inactive SpCas9 (SpCas9d), or a SpCas9 nickase (SpCas9n). In some embodiments, the SpCas9 comprises a D9X mutation, or a corresponding mutation in any of the amino acid sequences provided herein, wherein X is any amino acid except for D. In some embodiments, the SpCas9 comprises a D9A mutation, or a corresponding mutation in any of the amino acid sequences provided herein. In some embodiments, the SpCas9 domain, the SpCas9d domain, or the SpCas9n domain can bind to a nucleic acid sequence having a non-canonical PAM. In some embodiments, the SpCas9 domain, the SpCas9d domain, or the SpCas9n domain can bind to a nucleic acid sequence having an NGG, a NGA, or a NGCG PAM sequence.

[0682] In some embodiments, the SpCas9 domain comprises one or more of a D1135X, a R1335X, and a T1337X mutation, or a corresponding mutation in any of the amino acid sequences provided herein, wherein X is any amino acid. In some embodiments, the SpCas9 domain comprises one or more of a D1135E, R1335Q, and T1337R mutation, or a corresponding mutation in any of the amino acid sequences provided herein. In some embodiments, the SpCas9 domain comprises a D1135E, a R1335Q, and a T1337R mutation, or corresponding mutations in any of the amino acid sequences provided herein. In some embodiments, the SpCas9 domain comprises one or more of a D1135X, a R1335X, and a T1337X mutation, or a corresponding mutation in any of the amino acid sequences provided herein, wherein X is any amino acid. In some embodiments, the SpCas9 domain comprises one or more of a D1135V, a R1335Q, and a T1337R mutation, or a corresponding mutation in any of the amino acid sequences provided herein. In some embodiments, the SpCas9 domain comprises a D1135V, a R1335Q, and a T1337R mutation, or corresponding mutations in any of the amino acid sequences provided herein. In some embodiments, the SpCas9 domain comprises one or more of a D1135X, a G1218X, a R1335X, and a T1337X mutation, or a corresponding mutation in any of the amino acid sequences provided herein, wherein X is any amino acid. In some embodiments, the SpCas9 domain comprises one or more of a D1135V, a G1218R, a R1335Q, and a T1337R mutation, or a corresponding mutation in any of the amino acid sequences provided herein. In some embodiments, the SpCas9 domain comprises a D1135V, a G1218R, a R1335Q, and a T1337R mutation, or corresponding mutations in any of the amino acid sequences provided herein.

[0683] In some examples, a PAM recognized by a CRISPR protein-derived domain of a base editor disclosed herein can be provided to a cell on a separate oligonucleotide to an insert (e.g., an AAV insert) encoding the base editor. In such embodiments, providing PAM on a separate oligonucleotide can allow cleavage of a target sequence that otherwise would not be able to be cleaved, because no adjacent PAM is present on the same polynucleotide as the target sequence.

[0684] In an embodiment, S. pyogenes Cas9 (SpCas9) can be used as a CRISPR endonuclease for genome engineering. However, others can be used. In some embodiments, a different endonuclease can be used to target certain genomic targets. In some embodiments, synthetic SpCas9-derived variants with non-NGG PAM sequences can be used. Additionally, other Cas9 orthologues from various species have been identified and these “non-SpCas9s” can bind a variety of PAM sequences that can also be useful for the present disclosure. For example, the relatively large size of SpCas9 (approximately 4kb coding sequence) can lead to plasmids carrying the SpCas9 cDNA that cannot be efficiently expressed in a cell. Conversely, the coding sequence for Staphylococcus aureus Cas9 (SaCas9) is approximately 1 kilobase shorter than SpCas9, possibly allowing it to be efficiently expressed in a cell. Similar to SpCas9, the SaCas9 endonuclease is capable of modifying target genes in mammalian cells in vitro and in mice in vivo. In some embodiments, a Cas protein can target a different PAM sequence. In some embodiments, a target gene can be adjacent to a Cas9 PAM, 5′-NGG, for example. In other embodiments, other Cas9 orthologs can have different PAM requirements. For example, other PAMs such as those of S. thermophilus (5′-NNAGAA for CRISPRI and 5′-NGGNG for CRISPR3) and Neisseria meningitidis (5′-NNNNGATT) can also be found adjacent to a target gene.

[0685] In some embodiments, for a S. pyogenes system, a target gene sequence can precede (i.e., be 5′ to) a 5′-NGG PAM, and a 20-nt guide RNA sequence can base pair with an opposite strand to mediate a Cas9 cleavage adjacent to a PAM. In some embodiments, an adjacent cut can be or can be about 3 base pairs upstream of a PAM. In some embodiments, an adjacent cut can be or can be about 10 base pairs upstream of a PAM. In some embodiments, an adjacent cut can be or can be about 0-20 base pairs upstream of a PAM. For example, an adjacent cut can be next to, 1, 2, 3, 4, 5, 6, 7, 8, 9, 10, 11, 12, 13, 14, 15, 16, 17, 18, 19, 20, 21, 22, 23, 24, 25, 26, 27, 28, 29, or 30 base pairs upstream of a PAM. An adjacent cut can also be downstream of a PAM by 1 to 30 base pairs. The sequences of exemplary SpCas9 proteins capable of binding a PAM sequence follow:

[0686] In some embodiments, engineered SpCas9 variants are capable of recognizing protospacer adjacent motif (PAM) sequences flanked by a 3′ H (non-G PAM) (see Tables 3A-3D). In some embodiments, the SpCas9 variants recognize NRNH PAMs (where R is A or G and H is A, C or T). In some embodiments, the non-G PAM is NRRH, NRTH, or NRCH (see e.g., Miller, S. M., et al. Continuous evolution of SpCas9 variants compatible with non-G PAMs, Nat. Biotechnol. (2020), the contents of which is incorporated herein by reference in its entirety).

[0687] In some embodiments, the Cas9 domain is a recombinant Cas9 domain. In some embodiments, the recombinant Cas9 domain is a SpyMacCas9 domain. In some embodiments, the SpyMacCas9 domain is a nuclease active SpyMacCas9, a nuclease inactive SpyMacCas9 (SpyMacCas9d), or a SpyMacCas9 nickase (SpyMacCas9n). In some embodiments, the SaCas9 domain, the SaCas9d domain, or the SaCas9n domain can bind to a nucleic acid sequence having a non-canonical PAM. In some embodiments, the SpyMacCas9 domain, the SpCas9d domain, or the SpCas9n domain can bind to a nucleic acid sequence having a NAA PAM sequence.

[0688] The sequence of an exemplary Cas9 A homolog of Spy Cas9 in Streptococcus macacae with native 5′-NAAN-3′ PAM specificity is known in the art and described, for example, by Chatterjee, et al., “A Cas9 with PAM recognition for adenine dinucleotides”, Nature Communications, vol. 11, article no. 2474 (2020), and is in the Sequence Listing as SEQ ID NO: 237.

[0689] In some embodiments, a variant Cas9 protein harbors, H840A, P475A, W476A, N477A, D1125A, W1126A, and D1218A mutations such that the polypeptide has a reduced ability to cleave a target DNA or RNA. Such a Cas9 protein has a reduced ability to cleave a target DNA (e.g., a single stranded target DNA) but retains the ability to bind a target DNA (e.g., a single stranded target DNA). As another non-limiting example, in some embodiments, the variant Cas9 protein harbors D10A, H840A, P475A, W476A, N477A, D1125A, Wi 126A, and D1218A mutations such that the polypeptide has a reduced ability to cleave a target DNA. Such a Cas9 protein has a reduced ability to cleave a target DNA (e.g., a single stranded target DNA) but retains the ability to bind a target DNA (e.g., a single stranded target DNA). In some embodiments, when a variant Cas9 protein harbors W476A and Wi 126A mutations or when the variant Cas9 protein harbors P475A, W476A, N477A, D1125A, W1126A, and D1218A mutations, the variant Cas9 protein does not bind efficiently to a PAM sequence. Thus, in some such cases, when such a variant Cas9 protein is used in a method of binding, the method does not require a PAM sequence. In other words, in some embodiments, when such a variant Cas9 protein is used in a method of binding, the method can include a guide RNA, but the method can be performed in the absence of a PAM sequence (and the specificity of binding is therefore provided by the targeting segment of the guide RNA). Other residues can be mutated to achieve the above effects (i.e., inactivate one or the other nuclease portions). As non-limiting examples, residues D10, G12, G17, E762, H840, N854, N863, H982, H983, A984, D986, and/or A987 can be altered (i.e., substituted). Also, mutations other than alanine substitutions are suitable.

[0690] In some embodiments, a CRISPR protein-derived domain of a base editor can comprise all or a portion of a Cas9 protein with a canonical PAM sequence (NGG). In other embodiments, a Cas9-derived domain of a base editor can employ a non-canonical PAM sequence. Such sequences have been described in the art and would be apparent to the skilled artisan. For example, Cas9 domains that bind non-canonical PAM sequences have been described in Kleinstiver, B. P., et al., “Engineered CRISPR-Cas9 nucleases with altered PAM specificities” Nature 523, 481-485 (2015); and Kleinstiver, B. P., et al., “Broadening the targeting range of Staphylococcus aureus CRISPR-Cas9 by modifying PAM recognition” Nature Biotechnology 33, 1293-1298 (2015); R. T. Walton et al. “Unconstrained genome targeting with near-PAMless engineered CRISPR-Cas9 variants” Science 10.1126/science.aba8853 (2020); Hu et al. “Evolved Cas9 variants with broad PAM compatibility and high DNA specificity,” Nature, 2018 Apr. 5, 556(7699), 57-63; Miller et al., “Continuous evolution of SpCas9 variants compatible with non-G PAMs” Nat. Biotechnol., 2020 April; 38(4):471-481; the entire contents of each are hereby incorporated by reference.

Fusion Proteins Comprising a NapDNAbp and a Cytidine Deaminase and/or Adenosine Deaminase

[0691] Some aspects of the disclosure provide fusion proteins comprising a Cas9 domain or other nucleic acid programmable DNA binding protein (e.g., Cas12) and one or more cytidine deaminase or adenosine deaminase domains. It should be appreciated that the Cas9 domain may be any of the Cas9 domains or Cas9 proteins (e.g., dCas9 or nCas9) provided herein. In some embodiments, any of the Cas9 domains or Cas9 proteins (e.g., dCas9 or nCas9) provided herein may be fused with any of the cytidine deaminases and/or adenosine deaminases provided herein. The domains of the base editors disclosed herein can be arranged in any order.

[0692] In some embodiments, the fusion protein comprises the following domains A-C, A-D, or A-E:
[0693] NH₂-[A-B-C]-COOH;
[0694] NH₂-[A-B-C-D]-COOH; or
[0695] NH₂-[A-B-C-D-E]-COOH;
   wherein A and C or A, C, and E, each comprises one or more of the following:
[0696] an adenosine deaminase domain or an active fragment thereof,
[0697] a cytidine deaminase domain or an active fragment thereof,
[0698] and
[0699] wherein B or B and D, each comprises one or more domains having nucleic acid sequence specific binding activity.

[0700] In some embodiments, the fusion protein comprises the following structure:
[0701] NH₂-[Aₙ-Bₒ-Cₙ]-COOH;
[0702] NH₂-[Aₙ-Bₒ-Cₙ-Dₒ]-COOH; or
[0703] NH₂-[Aₙ-Bₒ-Cₚ-Dₒ-E_{q}]-COOH;
   wherein A and C or A, C, and E, each comprises one or more of the following:
[0704] an adenosine deaminase domain or an active fragment thereof,
[0705] a cytidine deaminase domain or an active fragment thereof, and
   wherein n is an integer: 1, 2, 3, 4, or 5, wherein p is an integer: 0, 1, 2, 3, 4, or 5; wherein q is an integer 0, 1, 2, 3, 4, or 5; and wherein B or B and D each comprises a domain having nucleic acid sequence specific binding activity; and wherein o is an integer: 1, 2, 3, 4, or 5.

[0706] For example, and without limitation, in some embodiments, the fusion protein comprises the structure:
[0707] NH₂-[adenosine deaminase]-[Cas9 domain]-COOH;
[0708] NH₂-[Cas9 domain]-[adenosine deaminase]-COOH;
[0709] NH₂-[cytidine deaminase]-[Cas9 domain]-COOH;
[0710] NH₂-[Cas9 domain]-[cytidine deaminase]-COOH;
[0711] NH₂-[cytidine deaminase]-[Cas9 domain]-[adenosine deaminase]-COOH;
[0712] NH₂-[adenosine deaminase]-[Cas9 domain]-[cytidine deaminase]-COOH;
[0713] NH₂-[adenosine deaminase]-[cytidine deaminase]-[Cas9 domain]-COOH;
[0714] NH₂-[cytidine deaminase]-[adenosine deaminase]-[Cas9 domain]-COOH;
[0715] NH₂-[Cas9 domain]-[adenosine deaminase]-[cytidine deaminase]-COOH; or
[0716] NH₂-[Cas9 domain]-[cytidine deaminase]-[adenosine deaminase]-COOH.

[0717] In some embodiments, any of the Cas12 domains or Cas12 proteins provided herein may be fused with any of the cytidine or adenosine deaminases provided herein. For example, and without limitation, in some embodiments, the fusion protein comprises the structure:
[0718] NH2-[adenosine deaminase]-[Cas12 domain]-COOH;
[0719] NH2-[Cas12 domain]-[adenosine deaminase]-COOH;
[0720] NH2-[cytidine deaminase]-[Cas12 domain]-COOH;
[0721] NH2-[Cas12 domain]-[cytidine deaminase]-COOH;
[0722] NH2-[cytidine deaminase]-[Cas12 domain]-[adenosine deaminase]-COOH;
[0723] NH2-[adenosine deaminase]-[Cas12 domain]-[cytidine deaminase]-COOH;
[0724] NH2-[adenosine deaminase]-[cytidine deaminase]-[Cas12 domain]-COOH;
[0725] NH2-[cytidine deaminase]-[adenosine deaminase]-[Cas12 domain]-COOH;
[0726] NH2-[Cas12 domain]-[adenosine deaminase]-[cytidine deaminase]-COOH; or
[0727] NH2-[Cas12 domain]-[cytidine deaminase]-[adenosine deaminase]-COOH.

[0728] In some embodiments, the adenosine deaminase is a TadA*8. Exemplary fusion protein structures include the following:
[0729] NH2-[TadA*8]-[Cas9 domain]-COOH;
[0730] NH2-[Cas9 domain]-[TadA*8]-COOH;
[0731] NH2-[TadA*8]-[Cas12 domain]-COOH; or
[0732] NH2-[Cas12 domain]-[TadA*8]-COOH.

[0733] In some embodiments, the adenosine deaminase of the fusion protein comprises a TadA*8 and a cytidine deaminase and/or an adenosine deaminase. In some embodiments, the TadA*8 is TadA*8.1, TadA*8.2, TadA*8.3, TadA*8.4, TadA*8.5, TadA*8.6, TadA*8.7, TadA*8.8, TadA*8.9, TadA*8.10, TadA*8.11, TadA*8.12, TadA*8.13, TadA*8.14, TadA*8.15, TadA*8.16, TadA*8.17, TadA*8.18, TadA*8.19, TadA*8.20, TadA*8.21, TadA*8.22, TadA*8.23, or TadA*8.24.

[0734] Exemplary fusion protein structures include the following:
[0735] NH2-[TadA*8]-[Cas9/Cas12]-[adenosine deaminase]-COOH;
[0736] NH2-[adenosine deaminase]-[Cas9/Cas12]-[TadA*8]-COOH;
[0737] NH2-[TadA*8]-[Cas9/Cas12]-[cytidine deaminase]-COOH; or
[0738] NH2-[cytidine deaminase]-[Cas9/Cas12]-[TadA*8]-COOH.

[0739] In some embodiments, the adenosine deaminase of the fusion protein comprises a TadA*9 and a cytidine deaminase and/or an adenosine deaminase. Exemplary fusion protein structures include the following:
[0740] NH2-[TadA*9]-[Cas9/Cas12]-[adenosine deaminase]-COOH;
[0741] NH2-[adenosine deaminase]-[Cas9/Cas12]-[TadA*9]-COOH;
[0742] NH2-[TadA*9]-[Cas9/Cas12]-[cytidine deaminase]-COOH; or
[0743] NH2-[cytidine deaminase]-[Cas9/Cas12]-[TadA*9]-COOH.

[0744] In some embodiments, the fusion protein can comprise a deaminase flanked by an N-terminal fragment and a C-terminal fragment of a Cas9 or Cas12 polypeptide. In some embodiments, the fusion protein comprises a cytidine deaminase flanked by an N-terminal fragment and a C-terminal fragment of a Cas9 or Cas12 polypeptide. In some embodiments, the fusion protein comprises an adenosine deaminase flanked by an N-terminal fragment and a C-terminal fragment of a Cas9 or Cas 12 polypeptide.

[0745] In some embodiments, the fusion proteins comprising a cytidine deaminase or adenosine deaminase and a napDNAbp (e.g., Cas9 or Cas12 domain) do not include a linker sequence. In some embodiments, a linker is present between the cytidine or adenosine deaminase and the napDNAbp. In some embodiments, the “-” used in the general architecture above indicates the presence of an optional linker. In some embodiments, cytidine or adenosine deaminase and the napDNAbp are fused via any of the linkers provided herein. For example, in some embodiments the cytidine or adenosine deaminase and the napDNAbp are fused via any of the linkers provided herein.

[0746] It should be appreciated that the fusion proteins of the present disclosure may comprise one or more additional features. For example, in some embodiments, the fusion protein may comprise inhibitors, cytoplasmic localization sequences, export sequences, such as nuclear export sequences, or other localization sequences, as well as sequence tags that are useful for solubilization, purification, or detection of the fusion proteins. Suitable protein tags provided herein include, but are not limited to, biotin carboxylase carrier protein (BCCP) tags, myc-tags, calmodulin-tags, FLAG-tags, hemagglutinin (HA)-tags, polyhistidine tags, also referred to as histidine tags or His-tags, maltose binding protein (MBP)-tags, nus-tags, glutathione-S-transferase (GST)-tags, green fluorescent protein (GFP)-tags, thioredoxin-tags, S-tags, Softags (e.g., Softag 1, Softag 3), strep-tags, biotin ligase tags, FlAsH tags, V5 tags, and SBP-tags. Additional suitable sequences will be apparent to those of skill in the art. In some embodiments, the fusion protein comprises one or more His tags.

[0747] Exemplary, yet nonlimiting, fusion proteins are described in International PCT Application Nos. PCT/2017/044935, PCT/US2019/044935, and PCT/US2020/016288, each of which is incorporated herein by reference for its entirety.

### Fusion Proteins Comprising a Nuclear Localization Sequence (NLS)

[0748] In some embodiments, the fusion proteins provided herein further comprise one or more (e.g., 2, 3, 4, 5) nuclear targeting sequences, for example a nuclear localization sequence (NLS). In one embodiment, a bipartite NLS is used. In some embodiments, a NLS comprises an amino acid sequence that facilitates the importation of a protein, that comprises an NLS, into the cell nucleus (e.g., by nuclear transport). In some embodiments, the NLS is fused to the N-terminus or the C-terminus of the fusion protein. In some embodiments, the NLS is fused to the C-terminus or N-terminus of an nCas9 domain or a dCas9 domain. In some embodiments, the NLS is fused to the N-terminus or C-terminus of the Cas12 domain. In some embodiments, the NLS is fused to the N-terminus or C-terminus of the cytidine or adenosine deaminase. In some embodiments, the NLS is fused to the fusion protein via one or more linkers. In some embodiments, the NLS is fused to the fusion protein without a linker. In some embodiments, the NLS comprises an amino acid sequence of any one of the NLS sequences provided or referenced herein. Additional nuclear localization sequences are known in the art and would be apparent to the skilled artisan. For example, NLS sequences are described in Plank et al., PCT/EP2000/011690, the contents of which are incorporated herein by reference for their disclosure of exemplary nuclear localization sequences. In some embodiments, an NLS comprises the amino acid sequence PKKKRKVEGADKRTADGSEFESPKKKRKV (SEQ ID NO: 328), KRTADGSEFESPKKKRKV (SEQ ID NO: 190), KRPAATKKAGQAKKKK (SEQ ID NO: 191), KKTELQTTNAENKTKKL (SEQ ID NO: 192), KRGINDRNFWRGENGRKTR (SEQ ID NO: 193), RKSGKIAAIVVKRPRKPKKKRKV (SEQ ID NO: 329), or MDSLLMNRRKFLYQFKNVRWAKGRRETYLC (SEQ ID NO: 196).

[0749] In some embodiments, the fusion proteins comprising a cytidine or adenosine deaminase, a Cas9 domain, and an NLS do not comprise a linker sequence. In some embodiments, linker sequences between one or more of the domains or proteins (e.g., cytidine or adenosine deaminase, Cas9 domain or NLS) are present. In some embodiments, a linker is present between the cytidine deaminase and adenosine deaminase domains and the napDNAbp. In some embodiments, the “-” used in the general architecture below indicates the presence of an optional linker. In some embodiments, the cytidine deaminase and adenosine deaminase and the napDNAbp are fused via any of the linkers provided herein. For example, in some embodiments the cytidine deaminase and adenosine deaminase and the napDNAbp are fused via any of the linkers provided herein.

[0750] In some embodiments, the general architecture of exemplary napDNAbp (e.g., Cas9 or Cas12) fusion proteins with a cytidine or adenosine deaminase and a napDNAbp (e.g., Cas9 or Cas12) domain comprises any one of the following structures, where NLS is a nuclear localization sequence (e.g., any NLS provided herein), NH₂ is the N-terminus of the fusion protein, and COOH is the C-terminus of the fusion protein:
[0751] NH₂-NLS-[cytidine deaminase]-[napDNAbp domain]-COOH;
[0752] NH₂-NLS [napDNAbp domain]-[cytidine deaminase]-COOH;
[0753] NH₂-[cytidine deaminase]-[napDNAbp domain]-NLS-COOH;
[0754] NH₂-[napDNAbp domain]-[cytidine deaminase]-NLS—COOH;
[0755] NH₂-NLS-[adenosine deaminase]-[napDNAbp domain]-COOH;
[0756] NH₂-NLS [napDNAbp domain]-[adenosine deaminase]-COOH;
[0757] NH₂-[adenosine deaminase]-[napDNAbp domain]-NLS—COOH;
[0758] NH₂-[napDNAbp domain]-[adenosine deaminase]-NLS—COOH;
[0759] NH₂-NLS-[cytidine deaminase]-[napDNAbp domain]-[adenosine deaminase]-COOH;
[0760] NH₂-NLS-[adenosine deaminase]-[napDNAbp domain]-[cytidine deaminase]-COOH;
[0761] NH₂-NLS-[adenosine deaminase] [cytidine deaminase]-[napDNAbp domain]-COOH;
[0762] NH₂-NLS-[cytidine deaminase]-[adenosine deaminase]-[napDNAbp domain]-COOH;
[0763] NH₂-NLS-[napDNAbp domain]-[adenosine deaminase]-[cytidine deaminase]-COOH;
[0764] NH₂-NLS-[napDNAbp domain]-[cytidine deaminase]-[adenosine deaminase]-COOH;
[0765] NH₂-[cytidine deaminase]-[napDNAbp domain]-[adenosine deaminase]-NLS—COOH;
[0766] NH₂-[adenosine deaminase]-[napDNAbp domain]-[cytidine deaminase]-NLS—COOH;
[0767] NH₂-[adenosine deaminase] [cytidine deaminase]-[napDNAbp domain]-NLS—COOH;
[0768] NH₂-[cytidine deaminase]-[adenosine deaminase]-[napDNAbp domain]-NLS—COOH;
[0769] NH₂-[napDNAbp domain]-[adenosine deaminase]-[cytidine deaminase]-NLS—COOH; or

[0770] NH₂-[napDNAbp domain]-[cytidine deaminase]-[adenosine deaminase]-NLS—COOH. In some embodiments, the NLS is present in a linker or the NLS is flanked by linkers, for example described herein. A bipartite NLS comprises two basic amino acid clusters, which are separated by a relatively short spacer sequence (hence bipartite—2 parts, while monopartite NLSs are not). The NLS of nucleoplasmin, KR[PAATKKAGQA]KKKK (SEQ ID NO: 191), is the prototype of the ubiquitous bipartite signal: two clusters of basic amino acids, separated by a spacer of about 10 amino acids. The sequence of an exemplary bipartite NLS follows: PKKKRKVEGADKRTADGSEFESPKKKRKV (SEQ ID NO: 328)

[0771] A vector that encodes a CRISPR enzyme comprising one or more nuclear localization sequences (NLSs) can be used. For example, there can be or be about 1, 2, 3, 4, 5, 6, 7, 8, 9, 10 NLSs used. A CRISPR enzyme can comprise the NLSs at or near the amino-terminus, about or more than about 1, 2, 3, 4, 5, 6, 7, 8, 9, 10 NLSs at or near the carboxy-terminus, or any combination thereof (e.g., one or more NLS at the amino-terminus and one or more NLS at the carboxy terminus). When more than one NLS is present, each can be selected independently of others, such that a single NLS can be present in more than one copy and/or in combination with one or more other NLSs present in one or more copies.

[0772] CRISPR enzymes used in the methods can comprise about 6 NLSs. Aₙ NLS is considered near the N- or C-terminus when the nearest amino acid to the NLS is within about 50 amino acids along a polypeptide chain from the N- or C-terminus, e.g., within 1, 2, 3, 4, 5, 10, 15, 20, 25, 30, 40, or 50 amino acids.

### Additional Domains

[0773] A base editor described herein can include any domain which helps to facilitate the nucleobase editing, modification or altering of a nucleobase of a polynucleotide. In some embodiments, a base editor comprises a polynucleotide programmable nucleotide binding domain (e.g., Cas9), a nucleobase editing domain (e.g., deaminase domain), and one or more additional domains. In some embodiments, the additional domain can facilitate enzymatic or catalytic functions of the base editor, binding functions of the base editor, or be inhibitors of cellular machinery (e.g., enzymes) that could interfere with the desired base editing result. In some embodiments, a base editor can comprise a nuclease, a nickase, a recombinase, a deaminase, a methyltransferase, a methylase, an acetylase, an acetyltransferase, a transcriptional activator, or a transcriptional repressor domain.

[0774] In some embodiments, a base editor can comprise an uracil glycosylase inhibitor (UGI) domain. In some embodiments, cellular DNA repair response to the presence of U: G heteroduplex DNA can be responsible for a decrease in nucleobase editing efficiency in cells. In such embodiments, uracil DNA glycosylase (UDG) can catalyze removal of U from DNA in cells, which can initiate base excision repair (BER), mostly resulting in reversion of the U:G pair to a C:G pair. In such embodiments, BER can be inhibited in base editors comprising one or more domains that bind the single strand, block the edited base, inhibit UGI, inhibit BER, protect the edited base, and/or promote repairing of the non-edited strand. Thus, this disclosure contemplates a base editor fusion protein comprising a UGI domain.

[0775] In some embodiments, a base editor comprises as a domain all or a portion of a double-strand break (DSB) binding protein. For example, a DSB binding protein can include a Gam protein of bacteriophage Mu that can bind to the ends of DSBs and can protect them from degradation. See Komor, A. C., et al., “Improved base excision repair inhibition and bacteriophage Mu Gam protein yields C:G-to-T:A base editors with higher efficiency and product purity” Science Advances 3:eaao4774 (2017), the entire content of which is hereby incorporated by reference.

[0776] Additionally, in some embodiments, a Gam protein can be fused to an N terminus of a base editor. In some embodiments, a Gam protein can be fused to a C terminus of a base editor. The Gam protein of bacteriophage Mu can bind to the ends of double strand breaks (DSBs) and protect them from degradation. In some embodiments, using Gam to bind the free ends of DSB can reduce indel formation during the process of base editing. In some embodiments, 174-residue Gam protein is fused to the N terminus of the base editors. See Komor, A. C., et al., “Improved base excision repair inhibition and bacteriophage Mu Gam protein yields C:G-to-T:A base editors with higher efficiency and product purity” Science Advances 3:eaao4774 (2017). In some embodiments, a mutation or mutations can change the length of a base editor domain relative to a wild type domain. For example, a deletion of at least one amino acid in at least one domain can reduce the length of the base editor. In another case, a mutation or mutations do not change the length of a domain relative to a wild type domain. For example, substitutions in any domain does not change the length of the base editor.

[0777] Non-limiting examples of such base editors, where the length of all the domains is the same as the wild type domains, can include:
[0778] NH2-[nucleobase editing domain]-Linker1-[APOBEC1]-Linker2-[nucleobase editing domain]-COOH;
[0779] NH2-[nucleobase editing domain]-Linker1-[APOBEC1]-[nucleobase editing domain]-COOH;
[0780] NH2-[nucleobase editing domain]-[APOBEC1]-Linker2-[nucleobase editing domain]-COOH;
[0781] NH2-[nucleobase editing domain]-[APOBEC1]-[nucleobase editing domain]-COOH;
[0782] NH2-[nucleobase editing domain]-Linker1-[APOBEC1]-Linker2-[nucleobase editing domain]-[UGI]-COOH;
[0783] NH2-[nucleobase editing domain]-Linker1-[APOBEC1]-[nucleobase editing domain]-[UGI]-COOH;
[0784] NH2-[nucleobase editing domain]-[APOBEC1]-Linker2-[nucleobase editing domain]-[UGI]-COOH;
[0785] NH2-[nucleobase editing domain]-[APOBEC1]-[nucleobase editing domain]-[UGI]-COOH;
[0786] NH2-[UGI]-[nucleobase editing domain]-Linker1-[APOBEC1]-Linker2-[nucleobase editing domain]-COOH;
[0787] NH2-[UGI]-[nucleobase editing domain]-Linker1-[APOBEC1]-[nucleobase editing domain]-COOH;
[0788] NH2-[UGI]-[nucleobase editing domain]-[APOBEC1]-Linker2-[nucleobase editing domain]-COOH; or
[0789] NH2-[UGI]-[nucleobase editing domain]-[APOBEC1]-[nucleobase editing domain]-COOH.

### Base Editor System

[0790] Provided herein are systems, compositions, and methods for editing a nucleobase using a base editor system. In some embodiments, the base editor system comprises (1) a base editor (BE) comprising a polynucleotide programmable nucleotide binding domain and a nucleobase editing domain (e.g., a deaminase domain) for editing the nucleobase; and (2) a guide polynucleotide (e.g., guide RNA) in conjunction with the polynucleotide programmable nucleotide binding domain. In some embodiments, the base editor system is a cytidine base editor (CBE) or an adenosine base editor (ABE). In some embodiments, the polynucleotide programmable nucleotide binding domain is a polynucleotide programmable DNA or RNA binding domain. In some embodiments, the nucleobase editing domain is a deaminase domain. In some embodiments, a deaminase domain can be a cytidine deaminase or an cytosine deaminase. In some embodiments, a deaminase domain can be an adenine deaminase or an adenosine deaminase. In some embodiments, the adenosine base editor can deaminate adenine in DNA. In some embodiments, the base editor is capable of deaminating a cytidine in DNA.

[0791] In some embodiments, a base editing system as provided herein provides a new approach to genome editing that uses a fusion protein containing a catalytically defective Streptococcus pyogenes Cas9, a deaminase (e.g., cytidine or adenosine deaminase), and an inhibitor of base excision repair to induce programmable, single nucleotide (C→T or A→G) changes in DNA without generating double-strand DNA breaks, without requiring a donor DNA template, and without inducing an excess of stochastic insertions and deletions.

[0792] Details of nucleobase editing proteins are described in International PCT Application Nos. PCT/2017/045381 (WO2018/027078) and PCT/US2016/058344 (WO2017/070632), each of which is incorporated herein by reference for its entirety. Also see Komor, A. C., et al., “Programmable editing of a target base in genomic DNA without double-stranded DNA cleavage” Nature 533, 420-424 (2016); Gaudelli, N. M., et al., “Programmable base editing of A·T to G·C in genomic DNA without DNA cleavage” Nature 551, 464-471 (2017); and Komor, A. C., et al., “Improved base excision repair inhibition and bacteriophage Mu Gam protein yields C:G-to-T:A base editors with higher efficiency and product purity” Science Advances 3:eaao4774 (2017), the entire contents of which are hereby incorporated by reference.

[0793] Use of the base editor system provided herein comprises the steps of: (a) contacting a target nucleotide sequence of a polynucleotide (e.g., double- or single stranded DNA or RNA) of a subject with a base editor system comprising a nucleobase editor (e.g., an adenosine base editor or a cytidine base editor) and a guide polynucleic acid (e.g., gRNA), wherein the target nucleotide sequence comprises a targeted nucleobase pair; (b) inducing strand separation of said target region; (c) converting a first nucleobase of said target nucleobase pair in a single strand of the target region to a second nucleobase; and (d) cutting no more than one strand of said target region, where a third nucleobase complementary to the first nucleobase base is replaced by a fourth nucleobase complementary to the second nucleobase. It should be appreciated that in some embodiments, step (b) is omitted. In some embodiments, said targeted nucleobase pair is a plurality of nucleobase pairs in one or more genes. In some embodiments, the base editor system provided herein is capable of multiplex editing of a plurality of nucleobase pairs in one or more genes. In some embodiments, the plurality of nucleobase pairs is located in the same gene. In some embodiments, the plurality of nucleobase pairs is located in one or more genes, wherein at least one gene is located in a different locus.

[0794] In some embodiments, the cut single strand (nicked strand) is hybridized to the guide nucleic acid. In some embodiments, the cut single strand is opposite to the strand comprising the first nucleobase. In some embodiments, the base editor comprises a Cas9 domain. In some embodiments, the first base is adenine, and the second base is not a G, C, A, or T. In some embodiments, the second base is inosine.

[0795] In some embodiments, a single guide polynucleotide may be utilized to target a deaminase to a target nucleic acid sequence. In some embodiments, a single pair of guide polynucleotides may be utilized to target different deaminases to a target nucleic acid sequence.

[0796] The nucleobase components and the polynucleotide programmable nucleotide binding component of a base editor system may be associated with each other covalently or non-covalently. For example, in some embodiments, the deaminase domain can be targeted to a target nucleotide sequence by a polynucleotide programmable nucleotide binding domain. In some embodiments, a polynucleotide programmable nucleotide binding domain can be fused or linked to a deaminase domain. In some embodiments, a polynucleotide programmable nucleotide binding domain can target a deaminase domain to a target nucleotide sequence by non-covalently interacting with or associating with the deaminase domain. For example, in some embodiments, the nucleobase editing component, e.g., the deaminase component can comprise an additional heterologous portion or domain that is capable of interacting with, associating with, or capable of forming a complex with an additional heterologous portion or domain that is part of a polynucleotide programmable nucleotide binding domain. In some embodiments, the additional heterologous portion may be capable of binding to, interacting with, associating with, or forming a complex with a polypeptide. In some embodiments, the additional heterologous portion may be capable of binding to, interacting with, associating with, or forming a complex with a polynucleotide. In some embodiments, the additional heterologous portion may be capable of binding to a guide polynucleotide. In some embodiments, the additional heterologous portion may be capable of binding to a polypeptide linker. In some embodiments, the additional heterologous portion may be capable of binding to a polynucleotide linker. The additional heterologous portion may be a protein domain. In some embodiments, the additional heterologous portion may be a K Homology (KH) domain, a MS2 coat protein domain, a PP7 coat protein domain, a SfMu Com coat protein domain, a steril alpha motif, a telomerase Ku binding motif and Ku protein, a telomerase Sm7 binding motif and Sm7 protein, or an RNA recognition motif.

[0797] A base editor system may further comprise a guide polynucleotide component. It should be appreciated that components of the base editor system may be associated with each other via covalent bonds, noncovalent interactions, or any combination of associations and interactions thereof. In some embodiments, a deaminase domain can be targeted to a target nucleotide sequence by a guide polynucleotide. For example, in some embodiments, the nucleobase editing component of the base editor system, e.g., the deaminase component, can comprise an additional heterologous portion or domain (e.g., polynucleotide binding domain such as an RNA or DNA binding protein) that is capable of interacting with, associating with, or capable of forming a complex with a portion or segment (e.g., a polynucleotide motif) of a guide polynucleotide. In some embodiments, the additional heterologous portion or domain (e.g., polynucleotide binding domain such as an RNA or DNA binding protein) can be fused or linked to the deaminase domain. In some embodiments, the additional heterologous portion may be capable of binding to, interacting with, associating with, or forming a complex with a polypeptide. In some embodiments, the additional heterologous portion may be capable of binding to, interacting with, associating with, or forming a complex with a polynucleotide. In some embodiments, the additional heterologous portion may be capable of binding to a guide polynucleotide. In some embodiments, the additional heterologous portion may be capable of binding to a polypeptide linker. In some embodiments, the additional heterologous portion may be capable of binding to a polynucleotide linker. The additional heterologous portion may be a protein domain. In some embodiments, the additional heterologous portion may be a K Homology (KH) domain, a MS2 coat protein domain, a PP7 coat protein domain, a SfMu Com coat protein domain, a sterile alpha motif, a telomerase Ku binding motif and Ku protein, a telomerase Sm7 binding motif and Sm7 protein, or an RNA recognition motif.

[0798] In some embodiments, a base editor system can further comprise an inhibitor of base excision repair (BER) component. It should be appreciated that components of the base editor system may be associated with each other via covalent bonds, noncovalent interactions, or any combination of associations and interactions thereof. The inhibitor of BER component may comprise a base excision repair inhibitor. In some embodiments, the inhibitor of base excision repair can be a uracil DNA glycosylase inhibitor (UGI). In some embodiments, the inhibitor of base excision repair can be an inosine base excision repair inhibitor. In some embodiments, the inhibitor of base excision repair can be targeted to the target nucleotide sequence by the polynucleotide programmable nucleotide binding domain. In some embodiments, a polynucleotide programmable nucleotide binding domain can be fused or linked to an inhibitor of base excision repair. In some embodiments, a polynucleotide programmable nucleotide binding domain can be fused or linked to a deaminase domain and an inhibitor of base excision repair. In some embodiments, a polynucleotide programmable nucleotide binding domain can target an inhibitor of base excision repair to a target nucleotide sequence by non-covalently interacting with or associating with the inhibitor of base excision repair. For example, in some embodiments, the inhibitor of base excision repair component can comprise an additional heterologous portion or domain that is capable of interacting with, associating with, or capable of forming a complex with an additional heterologous portion or domain that is part of a polynucleotide programmable nucleotide binding domain. In some embodiments, the inhibitor of base excision repair can be targeted to the target nucleotide sequence by the guide polynucleotide. For example, in some embodiments, the inhibitor of base excision repair can comprise an additional heterologous portion or domain (e.g., polynucleotide binding domain such as an RNA or DNA binding protein) that is capable of interacting with, associating with, or capable of forming a complex with a portion or segment (e.g., a polynucleotide motif) of a guide polynucleotide. In some embodiments, the additional heterologous portion or domain of the guide polynucleotide (e.g., polynucleotide binding domain such as an RNA or DNA binding protein) can be fused or linked to the inhibitor of base excision repair. In some embodiments, the additional heterologous portion may be capable of binding to, interacting with, associating with, or forming a complex with a polynucleotide. In some embodiments, the additional heterologous portion may be capable of binding to a guide polynucleotide. In some embodiments, the additional heterologous portion may be capable of binding to a polypeptide linker. In some embodiments, the additional heterologous portion may be capable of binding to a polynucleotide linker. The additional heterologous portion may be a protein domain. In some embodiments, the additional heterologous portion may be a K Homology (KH) domain, a MS2 coat protein domain, a PP7 coat protein domain, a SfMu Com coat protein domain, a sterile alpha motif, a telomerase Ku binding motif and Ku protein, a telomerase Sm7 binding motif and Sm7 protein, or an RNA recognition motif.

[0799] In some embodiments, the base editor inhibits base excision repair (BER) of the edited strand. In some embodiments, the base editor protects or binds the non-edited strand. In some embodiments, the base editor comprises UGI activity. In some embodiments, the base editor comprises a catalytically inactive inosine-specific nuclease. In some embodiments, the base editor comprises nickase activity. In some embodiments, the intended edit of base pair is upstream of a PAM site. In some embodiments, the intended edit of base pair is 1, 2, 3, 4, 5, 6, 7, 8, 9, 10, 11, 12, 13, 14, 15, 16, 17, 18, 19, or 20 nucleotides upstream of the PAM site. In some embodiments, the intended edit of base-pair is downstream of a PAM site. In some embodiments, the intended edited base pair is 1, 2, 3, 4, 5, 6, 7, 8, 9, 10, 11, 12, 13, 14, 15, 16, 17, 18, 19, or 20 nucleotides downstream stream of the PAM site.

[0800] In some embodiments, the method does not require a canonical (e.g., NGG) PAM site. In some embodiments, the nucleobase editor comprises a linker or a spacer. In some embodiments, the linker or spacer is 1-25 amino acids in length. In some embodiments, the linker or spacer is 5-20 amino acids in length. In some embodiments, the linker or spacer is 10, 11, 12, 13, 14, 15, 16, 17, 18, 19, or 20 amino acids in length.

[0801] In some embodiments, the base editing fusion proteins provided herein need to be positioned at a precise location, for example, where a target base is placed within a defined region (e.g., a “deamination window”). In some embodiments, a target can be within a 4 base region. In some embodiments, such a defined target region can be approximately 15 bases upstream of the PAM. See Komor, A. C., et al., “Programmable editing of a target base in genomic DNA without double-stranded DNA cleavage” Nature 533, 420-424 (2016); Gaudelli, N. M., et al., “Programmable base editing of A·T to G·C in genomic DNA without DNA cleavage” Nature 551, 464-471 (2017); and Komor, A. C., et al., “Improved base excision repair inhibition and bacteriophage Mu Gam protein yields C:G-to-T:A base editors with higher efficiency and product purity” Science Advances 3:eaao4774 (2017), the entire contents of which are hereby incorporated by reference.

[0802] In some embodiments, the target region comprises a target window, wherein the target window comprises the target nucleobase pair. In some embodiments, the target window comprises 1-10 nucleotides. In some embodiments, the target window is 1, 2, 3, 4, 5, 6, 7, 8, 9, 10, 11, 12, 13, 14, 15, 16, 17, 18, 19, or 20 nucleotides in length. In some embodiments, the intended edit of base pair is within the target window. In some embodiments, the target window comprises the intended edit of base pair. In some embodiments, the method is performed using any of the base editors provided herein. In some embodiments, a target window is a deamination window. A deamination window can be the defined region in which a base editor acts upon and deaminates a target nucleotide. In some embodiments, the deamination window is within a 2, 3, 4, 5, 6, 7, 8, 9, or 10 base regions. In some embodiments, the deamination window is 5, 6, 7, 8, 9, 10, 11, 12, 13, 14, 15, 16, 17, 18, 19, 20, 21, 22, 23, 24, or 25 bases upstream of the PAM.

[0803] The base editors of the present disclosure can comprise any domain, feature or amino acid sequence which facilitates the editing of a target polynucleotide sequence. For example, in some embodiments, the base editor comprises a nuclear localization sequence (NLS). In some embodiments, an NLS of the base editor is localized between a deaminase domain and a polynucleotide programmable nucleotide binding domain. In some embodiments, an NLS of the base editor is localized C-terminal to a polynucleotide programmable nucleotide binding domain.

[0804] Other exemplary features that can be present in a base editor as disclosed herein are localization sequences, such as cytoplasmic localization sequences, export sequences, such as nuclear export sequences, or other localization sequences, as well as sequence tags that are useful for solubilization, purification, or detection of the fusion proteins. Suitable protein tags provided herein include, but are not limited to, biotin carboxylase carrier protein (BCCP) tags, myc-tags, calmodulin-tags, FLAG-tags, hemagglutinin (HA)-tags, polyhistidine tags, also referred to as histidine tags or His-tags, maltose binding protein (MBP)-tags, nus-tags, glutathione-S-transferase (GST)-tags, green fluorescent protein (GFP)-tags, thioredoxin-tags, S-tags, Softags (e.g., Softag 1, Softag 3), strep-tags, biotin ligase tags, FlAsH tags, V5 tags, and SBP-tags. Additional suitable sequences will be apparent to those of skill in the art. In some embodiments, the fusion protein comprises one or more His tags.

[0805] In some embodiments, non-limiting exemplary cytidine base editors (CBE) include BE1 (APOBEC1-XTEN-dCas9), BE2 (APOBEC1-XTEN-dCas9-UGI), BE3 (APOBEC1-XTEN-dCas9(A840H)-UGI), BE3-Gam, saBE3, saBE4-Gam, BE4, BE4-Gam, saBE4, or saB4E-Gam. BE4 extends the APOBEC1-Cas9n(D10A) linker to 32 amino acids and the Cas9n-UGI linker to 9 amino acids, and appends a second copy of UGI to the C-terminus of the construct with another 9-amino acid linker into a single base editor construct. The base editors saBE3 and saBE4 have the S. pyogenes Cas9n(D10A) replaced with the smaller S. aureus Cas9n(D10A). BE3-Gam, saBE3-Gam, BE4-Gam, and saBE4-Gam have 174 residues of Gam protein fused to the N-terminus of BE3, saBE3, BE4, and saBE4 via the 16 amino acid XTEN linker.

[0806] In some embodiments, the adenosine base editor (ABE) can deaminate adenine in DNA. In some embodiments, ABE is generated by replacing APOBEC1 component of BE3 with natural or engineered E. coli TadA, human ADAR2, mouse ADA, or human ADAT2. In some embodiments, ABE comprises evolved TadA variant. In some embodiments, the ABE is ABE 1.2 (TadA*-XTEN-nCas9-NLS). In some embodiments, TadA* comprises A106V and D108N mutations.

[0807] In some embodiments, the ABE is a second-generation ABE. In some embodiments, the ABE is ABE2.1, which comprises additional mutations D147Y and E155V in TadA* (TadA*2.1). In some embodiments, the ABE is ABE2.2, ABE2.1 fused to catalytically inactivated version of human alkyl adenine DNA glycosylase (AAG with E125Q mutation). In some embodiments, the ABE is ABE2.3, ABE2.1 fused to catalytically inactivated version of E. coli Endo V (inactivated with D35A mutation). In some embodiments, the ABE is ABE2.6 which has a linker twice as long (32 amino acids, (SGGS)₂ (SEQ ID NO: 330)-XTEN-(SGGS)₂ (SEQ ID NO: 330)) as the linker in ABE2.1. In some embodiments, the ABE is ABE2.7, which is ABE2.1 tethered with an additional wild-type TadA monomer. In some embodiments, the ABE is ABE2.8, which is ABE2.1 tethered with an additional TadA*2.1 monomer. In some embodiments, the ABE is ABE2.9, which is a direct fusion of evolved TadA (TadA*2.1) to the N-terminus of ABE2.1. In some embodiments, the ABE is ABE2.10, which is a direct fusion of wild-type TadA to the N-terminus of ABE2.1. In some embodiments, the ABE is ABE2.11, which is ABE2.9 with an inactivating E59A mutation at the N-terminus of TadA* monomer. In some embodiments, the ABE is ABE2.12, which is ABE2.9 with an inactivating E59A mutation in the internal TadA* monomer.

[0808] In some embodiments, the ABE is a third generation ABE. In some embodiments, the ABE is ABE3.1, which is ABE2.3 with three additional TadA mutations (L84F, H123Y, and I156F).

[0809] In some embodiments, the ABE is a fourth generation ABE. In some embodiments, the ABE is ABE4.3, which is ABE3.1 with an additional TadA mutation A142N (TadA*4.3).

[0810] In some embodiments, the ABE is a fifth generation ABE. In some embodiments, the ABE is ABE5.1, which is generated by importing a consensus set of mutations from surviving clones (H36L, R51L, S146C, and K157N) into ABE3.1. In some embodiments, the ABE is ABE5.3, which has a heterodimeric construct containing wild-type E. coli TadA fused to an internal evolved TadA*. In some embodiments, the ABE is ABE5.2, ABE5.4, ABE5.5, ABE5.6, ABE5.7, ABE5.8, ABE5.9, ABE5.10, ABE5.11, ABE5.12, ABE5.13, or ABE5.14, as shown in Table 11 below. In some embodiments, the ABE is a sixth generation ABE. In some embodiments, the ABE is ABE6.1, ABE6.2, ABE6.3, ABE6.4, ABE6.5, or ABE6.6, as shown in Table 11 below. In some embodiments, the ABE is a seventh generation ABE. In some embodiments, the ABE is ABE7.1, ABE7.2, ABE7.3, ABE7.4, ABE7.5, ABE7.6, ABE7.7, ABE7.8, ABE 7.9, or ABE7.10, as shown in Table 11 below.

TABLE 11
Genotypes of ABEs

| | 23 | 26 | 36 | 37 | 48 | 49 | 51 | 72 | 84 | 87 | 106 | 108 | 123 | 125 | 142 | 146 | 147 | 152 | 155 | 156 | 157 | 161 |
|---|---|---|---|---|---|---|---|---|---|---|---|---|---|---|---|---|---|---|---|---|---|---|
| ABE0.1 | W | R | H | N | P | | R | N | L | S | A | D | H | G | A | S | D | R | E | I | K | K |
| ABE0.2 | W | R | H | N | P | | R | N | L | S | A | D | H | G | A | S | D | R | E | I | K | K |
| ABE1.1 | W | R | H | N | P | | R | N | L | S | A | N | H | G | A | S | D | R | E | I | K | K |
| ABE1.2 | W | R | H | N | P | | R | N | L | S | V | N | H | G | A | S | D | R | E | I | K | K |
| ABE2.1 | W | R | H | N | P | | R | N | L | S | V | N | H | G | A | S | Y | R | V | I | K | K |
| ABE2.2 | W | R | H | N | P | | R | N | L | S | V | N | H | G | A | S | Y | R | V | I | K | K |
| ABE2.3 | W | R | H | N | P | | R | N | L | S | V | N | H | G | A | S | Y | R | V | I | K | K |
| ABE2.4 | W | R | H | N | P | | R | N | L | S | V | N | H | G | A | S | Y | R | V | I | K | K |
| ABE2.5 | W | R | H | N | P | | R | N | L | S | V | N | H | G | A | S | Y | R | V | I | K | K |
| ABE2.6 | W | R | H | N | P | | R | N | L | S | V | N | H | G | A | S | Y | R | V | I | K | K |
| ABE2.7 | W | R | H | N | P | | R | N | L | S | V | N | H | G | A | S | Y | R | V | I | K | K |
| ABE2.8 | W | R | H | N | P | | R | N | L | S | V | N | H | G | A | S | Y | R | V | I | K | K |
| ABE2.9 | W | R | H | N | P | | R | N | L | S | V | N | H | G | A | S | Y | R | V | I | K | K |
| ABE2.10 | W | R | H | N | P | | R | N | L | S | V | N | H | G | A | S | Y | R | V | I | K | K |
| ABE2.11 | W | R | H | N | P | | R | N | L | S | V | N | H | G | A | S | Y | R | V | I | K | K |
| ABE2.12 | W | R | H | N | P | | R | N | L | S | V | N | Y | G | A | S | Y | R | V | I | K | K |
| ABE3.1 | W | R | H | N | P | | R | N | F | S | V | N | Y | G | A | S | Y | R | V | F | K | K |
| ABE3.2 | W | R | H | N | P | | R | N | F | S | V | N | Y | G | A | S | Y | R | V | F | K | K |
| ABE3.3 | W | R | H | N | P | | R | N | F | S | V | N | Y | G | A | S | Y | R | V | F | K | K |
| ABE3.4 | W | R | H | N | P | | R | N | F | S | V | N | Y | G | A | S | Y | R | V | F | K | K |
| ABE3.5 | W | R | H | N | P | | R | N | F | S | V | N | Y | G | A | S | Y | R | V | F | K | K |
| ABE3.6 | W | R | H | N | P | | R | N | F | S | V | N | Y | G | A | S | Y | R | V | F | K | K |
| ABE3.7 | W | R | H | N | P | | R | N | F | S | V | N | Y | G | A | S | Y | R | V | F | K | K |
| ABE3.8 | W | R | H | N | P | | R | N | F | S | V | N | Y | G | A | S | Y | R | V | F | K | K |
| ABE4.1 | W | R | H | N | P | | R | N | L | S | V | N | H | G | N | S | Y | R | V | I | K | K |
| ABE4.2 | W | G | H | N | P | | R | N | L | S | V | N | H | G | N | S | Y | R | V | I | K | K |
| ABE4.3 | W | R | H | N | P | | R | N | F | S | V | N | Y | G | N | S | Y | R | V | F | K | K |
| ABE5.1 | W | R | L | N | P | | L | N | F | S | V | N | Y | G | A | C | Y | R | V | F | N | K |
| ABE5.2 | W | R | H | S | P | | R | N | F | S | V | N | Y | G | A | S | Y | R | V | F | K | T |
| ABE5.3 | W | R | L | N | P | | L | N | I | S | V | N | Y | G | A | C | Y | R | V | F | N | K |
| ABE5.4 | W | R | H | S | P | | R | N | F | S | V | N | Y | G | A | S | Y | R | V | F | K | T |
| ABE5.5 | W | R | L | N | P | | L | N | F | S | V | N | Y | G | A | C | Y | R | V | F | N | K |
| ABE5.6 | W | R | L | N | P | | L | N | F | S | V | N | Y | G | A | C | Y | R | V | F | N | K |
| ABE5.7 | W | R | L | N | P | | L | N | F | S | V | N | Y | G | A | C | Y | R | V | F | N | K |
| ABE5.8 | W | R | L | N | P | | L | N | F | S | V | N | Y | G | A | C | Y | R | V | F | N | K |
| ABE5.9 | W | R | L | N | P | | L | N | F | S | V | N | Y | G | A | C | Y | R | V | F | N | K |
| ABE5.10 | W | R | L | N | P | | L | N | F | S | V | N | Y | G | A | C | Y | R | V | F | N | K |
| ABE5.11 | W | R | L | N | P | | L | N | F | S | V | N | Y | G | A | C | Y | R | V | F | N | K |
| ABE5.12 | W | R | L | N | P | | L | N | F | S | V | N | Y | G | A | C | Y | R | V | F | N | K |
| ABE5.13 | W | R | H | N | P | | L | D | F | S | V | N | Y | A | A | S | Y | R | V | F | K | K |
| ABE5.14 | W | R | H | N | S | | L | N | F | C | V | N | Y | G | A | S | Y | R | V | F | K | K |
| ABE6.1 | W | R | H | N | S | | L | N | F | S | V | N | Y | G | N | S | Y | R | V | F | K | K |
| ABE6.2 | W | R | H | N | T | V | L | N | F | S | V | N | Y | G | N | S | Y | R | V | F | N | K |
| ABE6.3 | W | R | L | N | S | | L | N | F | S | V | N | Y | G | A | C | Y | R | V | F | N | K |
| ABE6.4 | W | R | L | N | S | | L | N | F | S | V | N | Y | G | N | C | Y | R | V | F | N | K |
| ABE6.5 | W | R | L | N | T | V | L | N | F | S | V | N | Y | G | A | C | Y | R | V | F | N | K |
| ABE6.6 | W | R | L | N | T | V | L | N | F | S | V | N | Y | G | N | C | Y | R | V | F | N | K |
| ABE7.1 | W | R | L | N | A | | L | N | F | S | V | N | Y | G | A | C | Y | R | V | F | N | K |
| ABE7.2 | W | R | L | N | A | | L | N | F | S | V | N | Y | G | N | C | Y | R | V | F | N | K |
| ABE7.3 | L | R | L | N | A | | L | N | F | S | V | N | Y | G | A | C | Y | R | V | F | N | K |
| ABE7.4 | R | R | L | N | A | | L | N | F | S | V | N | Y | G | A | C | Y | R | V | F | N | K |
| ABE7.5 | W | R | L | N | A | | L | N | F | S | V | N | Y | G | A | C | Y | H | V | F | N | K |
| ABE7.6 | W | R | L | N | A | | L | N | I | S | V | N | Y | G | A | C | Y | P | V | F | N | K |
| ABE7.7 | L | R | L | N | A | | L | N | F | S | V | N | Y | G | A | C | Y | P | V | F | N | K |
| ABE7.8 | L | R | L | N | A | | L | N | F | S | V | N | Y | G | N | C | Y | R | V | F | N | K |
| ABE7.9 | L | R | L | N | A | | L | N | F | S | V | N | Y | G | N | C | Y | P | V | F | N | K |
| ABE7.10 | R | R | L | N | A | | L | N | F | S | V | N | Y | G | A | C | Y | P | V | F | N | K |

[0811] In some embodiments, the base editor is an eighth generation ABE (ABE8). In some embodiments, the ABE8 contains a TadA*8 variant. In some embodiments, the ABE8 has a monomeric construct containing a TadA*8 variant (“ABE8.x-m”). In some embodiments, the ABE8 is ABE8.1-m, which has a monomeric construct containing TadA*7.10 with a Y147T mutation (TadA*8.1). In some embodiments, the ABE8 is ABE8.2-m, which has a monomeric construct containing TadA*7.10 with a Y147R mutation (TadA*8.2). In some embodiments, the ABE8 is ABE8.3-m, which has a monomeric construct containing TadA*7.10 with a Q154S mutation (TadA*8.3). In some embodiments, the ABE8 is ABE8.4-m, which has a monomeric construct containing TadA*7.10 with a Y123H mutation (TadA*8.4). In some embodiments, the ABE8 is ABE8.5-m, which has a monomeric construct containing TadA*7.10 with a V82S mutation (TadA*8.5). In some embodiments, the ABE8 is ABE8.6-m, which has a monomeric construct containing TadA*7.10 with a T166R mutation (TadA*8.6). In some embodiments, the ABE8 is ABE8.7-m, which has a monomeric construct containing TadA*7.10 with a Q154R mutation (TadA*8.7). In some embodiments, the ABE8 is ABE8.8-m, which has a monomeric construct containing TadA*7.10 with Y147R, Q154R, and Y123H mutations (TadA*8.8). In some embodiments, the ABE8 is ABE8.9-m, which has a monomeric construct containing TadA*7.10 with Y147R, Q154R and I76Y mutations (TadA*8.9). In some embodiments, the ABE8 is ABE8.10-m, which has a monomeric construct containing TadA*7.10 with Y147R, Q154R, and T166R mutations (TadA*8.10). In some embodiments, the ABE8 is ABE8.11-m, which has a monomeric construct containing TadA*7.10 with Y147T and Q154R mutations (TadA*8.11). In some embodiments, the ABE8 is ABE8.12-m, which has a monomeric construct containing TadA*7.10 with Y147T and Q154S mutations (TadA*8.12).

[0812] In some embodiments, the ABE8 is ABE8.13-m, which has a monomeric construct containing TadA*7.10 with Y123H (Y123H reverted from H123Y), Y147R, Q154R and I76Y mutations (TadA*8.13). In some embodiments, the ABE8 is ABE8.14-m, which has a monomeric construct containing TadA*7.10 with I76Y and V82S mutations (TadA*8.14). In some embodiments, the ABE8 is ABE8.15-m, which has a monomeric construct containing TadA*7.10 with V82S and Y147R mutations (TadA*8.15). In some embodiments, the ABE8 is ABE8.16-m, which has a monomeric construct containing TadA*7.10 with V82S, Y123H (Y123H reverted from H123Y) and Y147R mutations (TadA*8.16). In some embodiments, the ABE8 is ABE8.17-m, which has a monomeric construct containing TadA*7.10 with V82S and Q154R mutations (TadA*8.17). In some embodiments, the ABE8 is ABE8.18-m, which has a monomeric construct containing TadA*7.10 with V82S, Y123H (Y123H reverted from H123Y) and Q154R mutations (TadA*8.18). In some embodiments, the ABE8 is ABE8.19-m, which has a monomeric construct containing TadA*7.10 with V82S, Y123H (Y123H reverted from H123Y), Y147R and Q154R mutations (TadA*8.19). In some embodiments, the ABE8 is ABE8.20-m, which has a monomeric construct containing TadA*7.10 with I76Y, V82S, Y123H (Y123H reverted from H123Y), Y147R and Q154R mutations (TadA*8.20). In some embodiments, the ABE8 is ABE8.21-m, which has a monomeric construct containing TadA*7.10 with Y147R and Q154S mutations (TadA*8.21). In some embodiments, the ABE8 is ABE8.22-m, which has a monomeric construct containing TadA*7.10 with V82S and Q154S mutations (TadA*8.22). In some embodiments, the ABE8 is ABE8.23-m, which has a monomeric construct containing TadA*7.10 with V82S and Y123H (Y123H reverted from H123Y) mutations (TadA*8.23). In some embodiments, the ABE8 is ABE8.24-m, which has a monomeric construct containing TadA*7.10 with V82S, Y123H (Y123H reverted from H123Y), and Y147T mutations (TadA*8.24).

[0813] In some embodiments, the ABE8 has a heterodimeric construct containing wild-type E. coli TadA fused to a TadA*8 variant (“ABE8.x-d”). In some embodiments, the ABE8 is ABE8.1-d, which has a heterodimeric construct containing wild-type E. coli TadA fused to TadA*7.10 with a Y147T mutation (TadA*8.1). In some embodiments, the ABE8 is ABE8.2-d, which has a heterodimeric construct containing wild-type E. coli TadA fused to TadA*7.10 with a Y147R mutation (TadA*8.2). In some embodiments, the ABE8 is ABE8.3-d, which has a heterodimeric construct containing wild-type E. coli TadA fused to TadA*7.10 with a Q154S mutation (TadA*8.3). In some embodiments, the ABE8 is ABE8.4-d, which has a heterodimeric construct containing wild-type E. coli TadA fused to TadA*7.10 with a Y123H mutation (TadA*8.4). In some embodiments, the ABE8 is ABE8.5-d, which has a heterodimeric construct containing wild-type E. coli TadA fused to TadA*7.10 with a V82S mutation (TadA*8.5). In some embodiments, the ABE8 is ABE8.6-d, which has a heterodimeric construct containing wild-type E. coli TadA fused to TadA*7.10 with a T166R mutation (TadA*8.6). In some embodiments, the ABE8 is ABE8.7-d, which has a heterodimeric construct containing wild-type E. coli TadA fused to TadA*7.10 with a Q154R mutation (TadA*8.7). In some embodiments, the ABE8 is ABE8.8-d, which has a heterodimeric construct containing wild-type E. coli TadA fused to TadA*7.10 with Y147R, Q154R, and Y123H mutations (TadA*8.8). In some embodiments, the ABE8 is ABE8.9-d, which has a heterodimeric construct containing wild-type E. coli TadA fused to TadA*7.10 with Y147R, Q154R and I76Y mutations (TadA*8.9). In some embodiments, the ABE8 is ABE8.10-d, which has a heterodimeric construct containing wild-type E. coli TadA fused to TadA*7.10 with Y147R, Q154R, and T166R mutations (TadA*8.10). In some embodiments, the ABE8 is ABE8.11-d, which has a heterodimeric construct containing wild-type E. coli TadA fused to TadA*7.10 with Y147T and Q154R mutations (TadA*8.11). In some embodiments, the ABE8 is ABE8.12-d, which has heterodimeric construct containing wild-type E. coli TadA fused to TadA*7.10 with Y147T and Q154S mutations (TadA*8.12). In some embodiments, the ABE8 is ABE8.13-d, which has a heterodimeric construct containing wild-type E. coli TadA fused to TadA*7.10 with Y123H (Y123H reverted from H123Y), Y147R, Q154R and I76Y mutations (TadA*8.13). In some embodiments, the ABE8 is ABE8.14-d, which has a heterodimeric construct containing wild-type E. coli TadA fused to TadA*7.10 with I76Y and V82S mutations (TadA*8.14). In some embodiments, the ABE8 is ABE8.15-d, which has a heterodimeric construct containing wild-type E. coli TadA fused to TadA*7.10 with V82S and Y147R mutations (TadA*8.15). In some embodiments, the ABE8 is ABE8.16-d, which has a heterodimeric construct containing wild-type E. coli TadA fused to TadA*7.10 with V82S, Y123H (Y123H reverted from H123Y) and Y147R mutations (TadA*8.16). In some embodiments, the ABE8 is ABE8.17-d, which has a heterodimeric construct containing wild-type E. coli TadA fused to TadA*7.10 with V82S and Q154R mutations (TadA*8.17). In some embodiments, the ABE8 is ABE8.18-d, which has a heterodimeric construct containing wild-type E. coli TadA fused to TadA*7.10 with V82S, Y123H (Y123H reverted from H123Y) and Q154R mutations (TadA*8.18). In some embodiments, the ABE8 is ABE8.19-d, which has a heterodimeric construct containing wild-type E. coli TadA fused to TadA*7.10 with V82S, Y123H (Y123H reverted from H123Y), Y147R and Q154R mutations (TadA*8.19). In some embodiments, the ABE8 is ABE8.20-d, which has a heterodimeric construct containing wild-type E. coli TadA fused to TadA*7.10 with I76Y, V82S, Y123H (Y123H reverted from H123Y), Y147R and Q154R mutations (TadA*8.20). In some embodiments, the ABE8 is ABE8.21-d, which has a heterodimeric construct containing wild-type E. coli TadA fused to TadA*7.10 with Y147R and Q154S mutations (TadA*8.21). In some embodiments, the ABE8 is ABE8.22-d, which has a heterodimeric construct containing wild-type E. coli TadA fused to TadA*7.10 with V82S and Q154S mutations (TadA*8.22). In some embodiments, the ABE8 is ABE8.23-d, which has a heterodimeric construct containing wild-type E. coli TadA fused to TadA*7.10 with V82S and Y123H (Y123H reverted from H123Y) mutations (TadA*8.23). In some embodiments, the ABE8 is ABE8.24-d, which has a heterodimeric construct containing wild-type E. coli TadA fused to TadA*7.10 with V82S, Y123H (Y123H reverted from H123Y), and Y147T mutations (TadA*8.24).

[0814] In some embodiments, the ABE8 has a heterodimeric construct containing TadA*7.10 fused to a TadA*8 variant (“ABE8.x-7”). In some embodiments, the ABE8 is ABE8.1-7, which has a heterodimeric construct containing TadA*7.10 fused to TadA*7.10 with a Y147T mutation (TadA*8.1). In some embodiments, the ABE8 is ABE8.2-7, which has a heterodimeric construct containing TadA*7.10 fused to TadA*7.10 with a Y147R mutation (TadA*8.2). In some embodiments, the ABE8 is ABE8.3-7, which has a heterodimeric construct containing TadA*7.10 fused to TadA*7.10 with a Q154S mutation (TadA*8.3). In some embodiments, the ABE8 is ABE8.4-7, which has a heterodimeric construct containing TadA*7.10 fused to TadA*7.10 with a Y123H mutation (TadA*8.4). In some embodiments, the ABE8 is ABE8.5-7, which has a heterodimeric construct containing TadA*7.10 fused to TadA*7.10 with a V82S mutation (TadA*8.5). In some embodiments, the ABE8 is ABE8.6-7, which has a heterodimeric construct containing TadA*7.10 fused to TadA*7.10 with a T166R mutation (TadA*8.6). In some embodiments, the ABE8 is ABE8.7-7, which has a heterodimeric construct containing TadA*7.10 fused to TadA*7.10 with a Q154R mutation (TadA*8.7). In some embodiments, the ABE8 is ABE8.8-7, which has a heterodimeric construct containing TadA*7.10 fused to TadA*7.10 with Y147R, Q154R, and Y123H mutations (TadA*8.8). In some embodiments, the ABE8 is ABE8.9-7, which has a heterodimeric construct containing TadA*7.10 fused to TadA*7.10 with Y147R, Q154R and I76Y mutations (TadA*8.9). In some embodiments, the ABE8 is ABE8.10-7, which has a heterodimeric construct containing TadA*7.10 fused to TadA*7.10 with Y147R, Q154R, and T166R mutations (TadA*8.10). In some embodiments, the ABE8 is ABE8.11-7, which has a heterodimeric construct containing TadA*7.10 fused to TadA*7.10 with Y147T and Q154R mutations (TadA*8.11). In some embodiments, the ABE8 is ABE8.12-7, which has a heterodimeric construct containing TadA*7.10 fused to TadA*7.10 with Y147T and Q154S mutations (TadA*8.12). In some embodiments, the ABE8 is ABE8.13-7, which has a heterodimeric construct containing TadA*7.10 fused to TadA*7.10 with Y123H (Y123H reverted from H123Y), Y147R, Q154R and I76Y mutations (TadA*8.13). In some embodiments, the ABE8 is ABE8.14-7, which has a heterodimeric construct containing TadA*7.10 fused to TadA*7.10 with I76Y and V82S mutations (TadA*8.14). In some embodiments, the ABE8 is ABE8.15-7, which has a heterodimeric construct containing TadA*7.10 fused to TadA*7.10 with V82S and Y147R mutations (TadA*8.15). In some embodiments, the ABE8 is ABE8.16-7, which has a heterodimeric construct containing TadA*7.10 fused to TadA*7.10 with V82S, Y123H (Y123H reverted from H123Y) and Y147R mutations (TadA*8.16). In some embodiments, the ABE8 is ABE8.17-7, which has a heterodimeric construct containing TadA*7.10 fused to TadA*7.10 with V82S and Q154R mutations (TadA*8.17). In some embodiments, the ABE8 is ABE8.18-7, which has a heterodimeric construct containing TadA*7.10 fused to TadA*7.10 with V82S, Y123H (Y123H reverted from H123Y) and Q154R mutations (TadA*8.18). In some embodiments, the ABE8 is ABE8.19-7, which has a heterodimeric construct containing TadA*7.10 fused to TadA*7.10 with V82S, Y123H (Y123H reverted from H123Y), Y147R and Q154R mutations (TadA*8.19). In some embodiments, the ABE8 is ABE8.20-7, which has a heterodimeric construct containing TadA*7.10 fused to TadA*7.10 with I76Y, V82S, Y123H (Y123H reverted from H123Y), Y147R and Q154R mutations (TadA*8.20). In some embodiments, the ABE8 is ABE8.21-7, which has a heterodimeric construct containing TadA*7.10 fused to TadA*7.10 with Y147R and Q154S mutations (TadA*8.21). In some embodiments, the ABE8 is ABE8.22-7, which has a heterodimeric construct containing TadA*7.10 fused to TadA*7.10 with V82S and Q154S mutations (TadA*8.22). In some embodiments, the ABE8 is ABE8.23-7, which has a heterodimeric construct containing TadA*7.10 fused to TadA*7.10 with V82S and Y123H (Y123H reverted from H123Y) mutations (TadA*8.23). In some embodiments, the ABE8 is ABE8.24-7, which has a heterodimeric construct containing TadA*7.10 fused to TadA*7.10 with V82S, Y123H (Y123H reverted from H123Y), and Y147T mutations (TadA*8.24 In some embodiments, the ABE is ABE8.1-m, ABE8.2-m, ABE8.3-m, ABE8.4-m, ABE8.5-m, ABE8.6-m, ABE8.7-m, ABE8.8-m, ABE8.9-m, ABE8.10-m, ABE8.11-m, ABE8.12-m, ABE8.13-m, ABE8.14-m, ABE8.15-m, ABE8.16-m, ABE8.17-m, ABE8.18-m, ABE8.19-m, ABE8.20-m, ABE8.21-m, ABE8.22-m, ABE8.23-m, ABE8.24-m, ABE8.1-d, ABE8.2-d, ABE8.3-d, ABE8.4-d, ABE8.5-d, ABE8.6-d, ABE8.7-d, ABE8.8-d, ABE8.9-d, ABE8.10-d, ABE8.11-d, ABE8.12-d, ABE8.13-d, ABE8.14-d, ABE8.15-d, ABE8.16-d, ABE8.17-d, ABE8.18-d, ABE8.19-d, ABE8.20-d, ABE8.21-d, ABE8.22-d, ABE8.23-d, or ABE8.24-d as shown in Table 12 below.

TABLE 12
Adenosine Base Editor 8 (ABE8) Variants

| ABE8 | Adenosine Deaminase | Adenosine Deaminase Description |
|---|---|---|
| ABE8.1-m | TadA*8.1 | Monomer_TadA*7.10 + Y147T |
| ABE8.2-m | TadA*8.2 | Monomer_TadA*7.10 + Y147R |
| ABE8.3-m | TadA*8.3 | Monomer_TadA*7.10 + Q154S |
| ABE8.4-m | TadA*8.4 | Monomer_TadA*7.10 + Y123H |
| ABE8.5-m | TadA*8.5 | Monomer_TadA*7.10 + V82S |
| ABE8.6-m | TadA*8.6 | Monomer_TadA*7.10 + T166R |
| ABE8.7-m | TadA*8.7 | Monomer_TadA*7.10 + Q154R |
| ABE8.8-m | TadA*8.8 | Monomer_TadA*7.10 + Y147R_Q154R_Y123H |
| ABE8.9-m | TadA*8.9 | Monomer_TadA*7.10 + Y147R_Q154R_I76Y |
| ABE8.10-m | TadA*8.10 | Monomer_TadA*7.10 + Y147R_Q154R_T166R |
| ABE8.11-m | TadA*8.11 | Monomer_TadA*7.10 + Y147T_Q154R |
| ABE8.12-m | TadA*8.12 | Monomer_TadA*7.10 + Y147T_Q154S |
| ABE8.13-m | TadA*8.13 | Monomer_TadA*7.10 + |
| | | Y123H_Y147R_Q154R_I76Y |
| ABE8.14-m | TadA*8.14 | Monomer_TadA*7.10 + I76Y_V82S |
| ABE8.15-m | TadA*8.15 | Monomer_TadA*7.10 + V82S_Y147R |
| ABE8.16-m | TadA*8.16 | Monomer_TadA*7.10 + V82S_Y123H_Y147R |
| ABE8.17-m | TadA*8.17 | Monomer_TadA*7.10 + V82S_Q154R |
| ABE8.18-m | TadA*8.18 | Monomer_TadA*7.10 + V82S_Y123H_Q154R |
| ABE8.19-m | TadA*8.19 | Monomer_TadA*7.10 + |
| | | V82S_Y123H_Y147R_Q154R |
| ABE8.20-m | TadA*8.20 | Monomer_TadA*7.10 + |
| | | I76Y_V82S_Y123H_Y147R_Q154R |
| ABE8.21-m | TadA*8.21 | Monomer_TadA*7.10 + Y147R_Q154S |
| ABE8.22-m | TadA*8.22 | Monomer_TadA*7.10 + V82S_Q154S |
| ABE8.23-m | TadA*8.23 | Monomer_TadA*7.10 + V82S_Y123H |
| ABE8.24-m | TadA*8.24 | Monomer_TadA*7.10 + V82S_Y123H_Y147T |
| ABE8.1-d | TadA*8.1 | Heterodimer_(WT) + (TadA*7.10 + Y147T) |
| ABE8.2-d | TadA*8.2 | Heterodimer_(WT) + (TadA*7.10 + Y147R) |
| ABE8.3-d | TadA*8.3 | Heterodimer_(WT) + (TadA*7.10 + Q154S) |
| ABE8.4-d | TadA*8.4 | Heterodimer_(WT) + (TadA*7.10 + Y123H) |
| ABE8.5-d | TadA*8.5 | Heterodimer_(WT) + (TadA*7.10 + V82S) |
| ABE8.6-d | TadA*8.6 | Heterodimer_(WT) + (TadA*7.10 + T166R) |
| ABE8.7-d | TadA*8.7 | Heterodimer_(WT) + (TadA*7.10 + Q154R) |
| ABE8.8-d | TadA*8.8 | Heterodimer_(WT) + (TadA*7.10 + |
| | | Y147R_Q154R_Y123H) |
| ABE8.9-d | TadA*8.9 | Heterodimer_(WT) + (TadA*7.10 + |
| | | Y147R_Q154R_I76Y) |
| ABE8.10-d | TadA*8.10 | Heterodimer_(WT) + (TadA*7.10 + |
| | | Y147R_Q154R_T166R) |
| ABE8.11-d | TadA*8.11 | Heterodimer_(WT) + (TadA*7.10 + Y147T_Q154R) |
| ABE8.12-d | TadA*8.12 | Heterodimer_(WT) + (TadA*7.10 + Y147T_Q154S) |
| ABE8.13-d | TadA*8.13 | Heterodimer_(WT) + (TadA*7.10 + |
| | | Y123H_Y147T_Q154R_I76Y) |
| ABE8.14-d | TadA*8.14 | Heterodimer_(WT) + (TadA*7.10 + I76Y_V82S) |
| ABE8.15-d | TadA*8.15 | Heterodimer_(WT) + (TadA*7.10 + V82S_Y147R) |
| ABE8.16-d | TadA*8.16 | Heterodimer_(WT) + (TadA*7.10 + |
| | | V82S_Y123H_Y147R) |
| ABE8.17-d | TadA*8.17 | Heterodimer_(WT) + (TadA*7.10 + V82S_Q154R) |
| ABE8.18-d | TadA*8.18 | Heterodimer_(WT) + (TadA*7.10 + |
| | | V82S_Y123H_Q154R) |
| ABE8.19-d | TadA*8.19 | Heterodimer_(WT) + (TadA*7.10 + |
| | | V82S_Y123H_Y147R_Q154R) |
| ABE8.20-d | TadA*8.20 | Heterodimer_(WT) + (TadA*7.10 + |
| | | I76Y_V82S_Y123H_Y147R_Q154R) |
| ABE8.21-d | TadA*8.21 | Heterodimer_(WT) + (TadA*7.10 + Y147R_Q154S) |
| ABE8.22-d | TadA*8.22 | Heterodimer_(WT) + (TadA*7.10 + V82S_Q154S) |
| ABE8.23-d | TadA*8.23 | Heterodimer_(WT) + (TadA*7.10 + V82S_Y123H) |
| ABE8.24-d | TadA*8.24 | Heterodimer_(WT) + (TadA*7.10 + |
| | | V82S_Y123H_Y147T) |

[0815] In some embodiments, the ABE8 is ABE8a-m, which has a monomeric construct containing TadA*7.10 with R26C, A109S, T111R, D119N, H122N, Y147D, F149Y, T1661, and D167N mutations (TadA*8a). In some embodiments, the ABE8 is ABE8b-m, which has a monomeric construct containing TadA*7.10 with V88A, A109S, T111R, D119N, H122N, F149Y, T166I, and D167N mutations (TadA*8b). In some embodiments, the ABE8 is ABE8c-m, which has a monomeric construct containing TadA*7.10 with R26C, A109S, T111R, D119N, H122N, F149Y, T166I, and D167N mutations (TadA*8c). In some embodiments, the ABE8 is ABE8d-m, which has a monomeric construct containing TadA*7.10 with V88A, T111R, D119N, and F149Y mutations (TadA*8d). In some embodiments, the ABE8 is ABE8e-m, which has a monomeric construct containing TadA*7.10 with A109S, T111R, D119N, H122N, Y147D, F149Y, T166I, and D167N mutations (TadA*8e).

[0816] In some embodiments, the ABE8 is ABE8a-d, which has a heterodimeric construct containing wild-type E. coli TadA fused to TadA*7.10 with R26C, A109S, T111R, D119, H122N, Y147D, F149Y, T166I, and D167N mutations (TadA*8a). In some embodiments, the ABE8 is ABE8b-d, which has a heterodimeric construct containing wild-type E. coli TadA fused to TadA*7.10 with V88A, A109S, T111R, D119N, H122N, F149Y, T166I, and D167N mutations (TadA*8b). In some embodiments, the ABE8 is ABE8c-d, which has a heterodimeric construct containing wild-type E. coli TadA fused to TadA*7.10 with R26C, A109S, T111R, D119N, H122N, F149Y, T166I, and D167N mutations (TadA*8c). In some embodiments, the ABE8 is ABE8d-d, which has a heterodimeric construct containing wild-type E. coli TadA fused to TadA*7.10 with V88A, T111R, D119N, and F149Y mutations (TadA*8d). In some embodiments, the ABE8 is ABE8e-d, which has a heterodimeric construct containing wild-type E. coli TadA fused to TadA*7.10 with A109S, T111R, Di 19N, H122N, Y147D, F149Y, T166I, and D167N mutations (TadA*8e).

[0817] In some embodiments, the ABE8 is ABE8a-7, which has a heterodimeric construct containing TadA*7.10 fused to TadA*7.10 with R26C, A109S, T111R, D119, H122N, Y147D, F149Y, T166I, and D167N mutations (TadA*8a). In some embodiments, the ABE8 is ABE8b-7, which has a heterodimeric construct containing TadA*7.10 fused to TadA*7.10 with V88A, A109S, T111R, D119N, H122N, F149Y, T166I, and D167N mutations (TadA*8b). In some embodiments, the ABE8 is ABE8c-7, which has a heterodimeric construct containing TadA*7.10 fused to TadA*7.10 with R26C, A109S, T111R, Di 19N, H122N, F149Y, T1661, and D167N mutations (TadA*8c). In some embodiments, the ABE8 is ABE8d-7, which has a heterodimeric construct containing TadA*7.10 fused to TadA*7.10 with V88A, T111R, Di 19N, and F149Y mutations (TadA*8d). In some embodiments, the ABE8 is ABE8e-7, which has a heterodimeric construct containing TadA*7.10 fused to TadA*7.10 with A109S, T111R, D119N, H122N, Y147D, F149Y, T166I, and D167N mutations (TadA*8e).

In some embodiments, the ABE is ABE8a-m, ABE8b-m, ABE8c-m, ABE8d-m, ABE8e-m, ABE8a-d, ABE8b-d, ABE8c-d, ABE8d-d, or ABE8e-d, as shown in Table 13 below. In some embodiments, the ABE is ABE8e-m or ABE8e-d. ABE8e shows efficient adenine base editing activity and low indel formation when used with Cas homologues other than SpCas9, for example, SaCas9, SaCas9-KKH, Cas12a homologues, e.g., LbCas12a, enAs-Cas12a, SpCas9-NG and circularly permuted CP1028-SpCas9 and CP1041-SpCas9. In addition to the mutations shown for ABE8e in Table 13, off-target RNA and DNA editing were reduced by introducing a V106W substitution into the TadA domain (as described in M. Richter et al., 2020, Nature Biotechnology, doi.org/10.1038/s41587-020-0453-z, the entire contents of which are incorporated by reference herein).

TABLE 13
Additional Adenosine Base Editor 8 Variants. In the table, “monomer”
indicates an ABE comprising a single TadA*7.10 comprising the indicated alterations
and “heterodimer” indicates an ABE comprising a TadA*7.10 comprising
the indicated alterations fused to an E. coli TadA adenosine deaminase.

| ABE8 Base | Adenosine | |
|---|---|---|
| Editor | Deaminase | Adenosine Deaminase Description |
| ABE8a-m | TadA*8a | Monomer_TadA*7.10 + R26C + A109S + T111R + D119N + |
| | | H122N + Y147D + F149Y + T166I + D167N |
| ABE8b-m | TadA*8b | Monomer_TadA*7.10 + V88A + A109S + T111R + D119N + |
| | | H122N + F149Y + T166I + D167N |
| ABE8c-m | TadA*8c | Monomer_TadA*7.10 + R26C + A109S + T111R + D119N + |
| | | H122N + F149Y + T166I + D167N |
| ABE8d-m | TadA*8d | Monomer_TadA*7.10 + V88A + T111R + D119N + F149Y |
| ABE8e-m | TadA*8e | Monomer_TadA*7.10 + A109S + T111R + D119N + H122N + |
| | | Y147D + F149Y + T166I + D167N |
| ABE8a-d | TadA*8a | Heterodimer_(WT) + (TadA*7.10 + R26C + A109S + T111R + |
| | | D119N + H122N + Y147D + F149Y + T166I + D167N) |
| ABE8b-d | TadA*8b | Heterodimer_(WT) + (TadA*7.10 + V88A + A109S + T111R + |
| | | D119N + H122N + F149Y + T166I + D167N) |
| ABE8c-d | TadA*8c | Heterodimer_(WT) + (TadA*7.10 + R26C + A109S + T111R + |
| | | D119N + H122N + F149Y + T166I + D167N) |
| ABE8d-d | TadA*8d | Heterodimer_(WT) + (TadA*7.10 + V88A + T111R + D119N + |
| | | F149Y) |
| ABE8e-d | TadA*8e | Heterodimer_(WT) + (TadA*7.10 + A109S + T111R + |
| | | D119N + H122N + Y147D + F149Y + T166I + D167N) |

In some embodiments, base editors (e.g., ABE8) are generated by cloning an adenosine deaminase variant (e.g., TadA*8) into a scaffold that includes a circular permutant Cas9 (e.g., CP5 or CP6) and a bipartite nuclear localization sequence. In some embodiments, the base editor (e.g., ABE7.9, ABE7.10, or ABE8) is an NGC PAM CP5 variant (S. pyogenes Cas9 or spVRQR Cas9). In some embodiments, the base editor (e.g., ABE7.9, ABE7.10, or ABE8) is an AGA PAM CP5 variant (S. pyogenes Cas9 or spVRQR Cas9). In some embodiments, the base editor (e.g., ABE7.9, ABE7.10, or ABE8) is an NGC PAM CP6 variant (S. pyogenes Cas9 or spVRQR Cas9). In some embodiments, the base editor (e.g. ABE7.9, ABE7.10, or ABE8) is an AGA PAM CP6 variant (S. pyogenes Cas9 or spVRQR Cas9).

[0818] In some embodiments, the ABE has a genotype as shown in Table 14 below.

TABLE 14
Genotypes of ABEs

| | 23 | 26 | 36 | 37 | 48 | 49 | 51 | 72 | 84 | 87 | 105 | 108 | 123 | 125 | 142 | 145 | 147 | 152 | 155 | 156 | 157 | 161 |
|---|---|---|---|---|---|---|---|---|---|---|---|---|---|---|---|---|---|---|---|---|---|---|
| ABE7.9 | L | R | L | N | A | | L | N | F | S | V | N | Y | G | N | C | Y | P | V | F | N | K |
| ABE7.10 | R | R | L | N | A | | L | N | F | S | V | N | Y | G | A | C | Y | P | V | F | N | K |

As shown in Table 15 below, genotypes of 40 ABE8s are described. Residue positions in the evolved E. coli TadA portion of ABE are indicated. Mutational changes in ABE8 are shown when distinct from ABE7.10 mutations. In some embodiments, the ABE has a genotype of one of the ABEs as shown in Table 15 below.

TABLE 15
Residue Identity in Evolved TadA

| | 23 | 36 | 48 | 51 | 76 | 82 | 84 | 106 | 108 | 123 | 146 | 147 | 152 | 154 | 155 | 156 | 157 | 166 |
|---|---|---|---|---|---|---|---|---|---|---|---|---|---|---|---|---|---|---|
| ABE7.10 | R | L | A | L | I | V | F | V | N | Y | C | Y | P | Q | V | F | N | T |
| ABE8.1-m | | | | | | | | | | | | T | | | | | | |
| ABE8.2-m | | | | | | | | | | | | R | | | | | | |
| ABE8.3-m | | | | | | | | | | | | | | S | | | | |
| ABE8.4-m | | | | | | | | | | H | | | | | | | | |
| ABE8.5-m | | | | | | S | | | | | | | | | | | | |
| ABE8.6-m | | | | | | | | | | | | | | | | | | R |
| ABE8.7-m | | | | | | | | | | | | | | R | | | | |
| ABE8.8-m | | | | | | | | | | H | | R | | R | | | | |
| ABE8.9-m | | | | | Y | | | | | | | R | | R | | | | |
| ABE8.10-m | | | | | | | | | | | | R | | R | | | | R |
| ABE8.11-m | | | | | | | | | | | | T | | R | | | | |
| ABE8.12-m | | | | | | | | | | | | T | | S | | | | |
| ABE8.13-m | | | | | Y | | | | | H | | R | | R | | | | |
| ABE8.14-m | | | | | Y | S | | | | | | | | | | | | |
| ABE8.15-m | | | | | | S | | | | | | R | | | | | | |
| ABE8.16-m | | | | | | S | | | | H | | R | | | | | | |
| ABE8.17-m | | | | | | S | | | | | | | | R | | | | |
| ABE8.18-m | | | | | | S | | | | H | | | | R | | | | |
| ABE8.19-m | | | | | | S | | | | H | | R | | R | | | | |
| ABE8.20-m | | | | | Y | S | | | | H | | R | | R | | | | |
| ABE8.21-m | | | | | | | | | | | | R | | S | | | | |
| ABE8.22-m | | | | | | S | | | | | | | | S | | | | |
| ABE8.23-m | | | | | | S | | | | H | | | | | | | | |
| ABE8.24-m | | | | | | S | | | | H | | T | | | | | | |
| ABE8.1-d | | | | | | | | | | | | T | | | | | | |
| ABE8.2-d | | | | | | | | | | | | R | | | | | | |
| ABE8.3-d | | | | | | | | | | | | | | S | | | | |
| ABE8.4-d | | | | | | | | | | H | | | | | | | | |
| ABE8.5-d | | | | | | S | | | | | | | | | | | | |
| ABE8.6-d | | | | | | | | | | | | | | | | | | R |
| ABE8.7-d | | | | | | | | | | | | | | R | | | | |
| ABE8.8-d | | | | | | | | | | H | | R | | R | | | | |
| ABE8.9-d | | | | | Y | | | | | | | R | | R | | | | |
| ABE8.10-d | | | | | | | | | | | | R | | R | | | | R |
| ABE8.11-d | | | | | | | | | | | | T | | R | | | | |
| ABE8.12-d | | | | | | | | | | | | T | | S | | | | |
| ABE8.13-d | | | | | Y | | | | | H | | R | | R | | | | |
| ABE8.14-d | | | | | Y | S | | | | | | | | | | | | |
| ABE8.15-d | | | | | | S | | | | | | R | | | | | | |
| ABE7.10 | R | L | A | L | I | V | F | V | N | Y | C | Y | P | Q | V | F | N | T |
| ABE8.16-d | | | | | | S | | | | H | | R | | | | | | |
| ABE8.17-d | | | | | | S | | | | | | | | R | | | | |
| ABE8.18-d | | | | | | S | | | | H | | | | R | | | | |
| ABE8.19-d | | | | | | S | | | | H | | R | | R | | | | |
| ABE8.20-d | | | | | Y | S | | | | H | | R | | R | | | | |
| ABE8.21-d | | | | | | | | | | | | R | | S | | | | |
| ABE8.22-d | | | | | | S | | | | | | | | S | | | | |
| ABE8.23-d | | | | | | S | | | | H | | | | | | | | |
| ABE8.24-d | | | | | | S | | | | H | | T | | | | | | |

[0819] In some embodiments, the base editor is ABE8.1, which comprises or consists essentially of the following sequence or a fragment thereof having adenosine deaminase activity:
[0820] ABE8.1_Y147T_CP5_NGC PAM_monomer

(SEQ ID NO: 331)
MSEVEFSHEYWMRHALTLAKRARDEREVPVGAVLVLNNRVIGEGWNRAIGLHDPTAHAEIMA
LRQGGLVMQNYRLIDATLYVTFEPCVMCAGAMIHSRIGRVVFGVRNAKTGAAGSLMDVLHYP
GMNHRVEITEGILADECAALLCTFFRMPRQVFNAQKKAQSSTDSGGSSGGSSGSETPGTSES
ATPESSGGSSGGSEIGKATAKYFFYSNIMNFFKTEITLANGEIRKRPLIETNGETGEIVWDK
GRDFATVRKVLSMPQVNIVKKTEVQTGGFSKESILPKRNSDKLIARKKDWDPKKYGGFMQPT
VAYSVLVVAKVEKGKSKKLKSVKELLGITIMERSSFEKNPIDFLEAKGYKEVKKDLIIKLPK
YSLFELENGRKRMLASAKFLQKGNELALPSKYVNFLYLASHYEKLKGSPEDNEQKQLFVEQH
KHYLDEIIEQISEFSKRVILADANLDKVLSAYNKHRDKPIREQAENIIHLFTLTNLGAPRAF
KYFDTTIARKEYRSTKEVLDATLIHQSITGLYETRIDLSQLGGDGGSGGSGGSGGSGGSGGS
GGMDKKYSIGLAIGTNSVGWAVITDEYKVPSKKFKVLGNTDRHSIKKNLIGALLFDSGETAE
ATRLKRTARRRYTRRKNRICYLQEIFSNEMAKVDDSFFHRLEESFLVEEDKKHERHPIFGNI
VDEVAYHEKYPTIYHLRKKLVDSTDKADLRLIYLALAHMIKFRGHFLIEGDLNPDNSDVDKL
FIQLVQTYNQLFEENPINASGVDAKAILSARLSKSRRLENLIAQLPGEKKNGLFGNLIALSL
GLTPNFKSNFDLAEDAKLQLSKDTYDDDLDNLLAQIGDQYADLFLAAKNLSDAILLSDILRV
NTEITKAPLSASMIKRYDEHHQDLTLLKALVRQQLPEKYKEIFFDQSKNGYAGYIDGGASQE
EFYKFIKPILEKMDGTEELLVKLNREDLLRKQRTFDNGSIPHQIHLGELHAILRRQEDFYPF
LKDNREKIEKILTFRIPYYVGPLARGNSRFAWMTRKSEETITPWNFEEVVDKGASAQSFIER
MTNFDKNLPNEKVLPKHSLLYEYFTVYNELTKVKYVTEGMRKPAFLSGEQKKAIVDLLFKTN
RKVTVKQLKEDYFKKIECFDSVEISGVEDRFNASLGTYHDLLKIIKDKDFLDNEENEDILED
IVLTLTLFEDREMIEERLKTYAHLFDDKVMKQLKRRRYTGWGRLSRKLINGIRDKQSGKTIL
DFLKSDGFANRNFMQLIHDDSLTFKEDIQKAQVSGQGDSLHEHIANLAGSPAIKKGILQTVK
VVDELVKVMGRHKPENIVIEMARENQTTQKGQKNSRERMKRIEEGIKELGSQILKEHPVENT
QLQNEKLYLYYLQNGRDMYVDQELDINRLSDYDVDHIVPQSFLKDDSIDNKVLTRSDKNRGK
SDNVPSEEVVKKMKNYWRQLLNAKLITQRKFDNLTKAERGGLSELDKAGFIKRQLVETRQIT
KHVAQILDSRMNTKYDENDKLIREVKVITLKSKLVSDFRKDFQFYKVREINNYHHAHDAYLN
AVVGTALIKKYPKLESEFVYGDYKVYDVRKMIAKSEQEGADKRTADGSEFESPKKKRKV

[0821] In the above sequence, the plain text denotes an adenosine deaminase sequence, bold sequence indicates sequence derived from Cas9, the italicized sequence denotes a linker sequence, and the underlined sequence denotes a bipartite nuclear localization sequence. Other ABE8 sequences are provided in the attached sequence listing (SEQ TD NOs: 332-354).

[0822] In some embodiments, the base editor is a ninth generation ABE (ABE9). In some embodiments, the ABE9 contains a TadA*9 variant. ABE9 base editors include an adenosine deaminase variant comprising an amino acid sequence, which contains alterations relative to an ABE 7*10 reference sequence, as described herein. Exemplary ABE9 variants are listed in Table 16. Details ofABE9 base editors are described in International PCT Application No. PCT/2020/049975, which is incorporated herein by reference for its entirety.

TABLE 16
Adenosine Base Editor 9 (ABE9) Variants. In the table, “monomer”
indicates an ABE comprising a single TadA*7.10 comprising
the indicated alterations and “heterodimer” indicates
an ABE comprising a TadA*7.10 comprising the indicated alterations
fused to an E. coli TadA adenosine deaminase.

| ABE9 Description | Alterations |
|---|---|
| ABE9.1_monomer | E25F, V82S, Y123H, T133K, Y147R, Q154R |
| ABE9.2_monomer | E25F, V82S, Y123H, Y147R, Q154R |
| ABE9.3_monomer | V82S, Y123H, P124W, Y147R, Q154R |
| ABE9.4_monomer | L51W, V82S, Y123H, C146R, Y147R, Q154R |
| ABE9.5_monomer | P54C, V82S, Y123H, Y147R, Q154R |
| ABE9.6_monomer | Y73S, V82S, Y123H, Y147R, Q154R |
| ABE9.7_monomer | N38G, V82T, Y123H, Y147R, Q154R |
| ABE9.8_monomer | R23H, V82S, Y123H, Y147R, Q154R |
| ABE9.9_monomer | R21N, V82S, Y123H, Y147R, Q154R |
| ABE9.10_monomer | V82S, Y123H, Y147R, Q154R, A158K |
| ABE9.11_monomer | N72K, V82S, Y123H, D139L, Y147R, Q154R, |
| ABE9.12_monomer | E25F, V82S, Y123H, D139M, Y147R, Q154R |
| ABE9.13_monomer | M70V, V82S, M94V, Y123H, Y147R, Q154R |
| ABE9.14_monomer | Q71M, V82S, Y123H, Y147R, Q154R |
| ABE9.15_heterodimer | E25F, V82S, Y123H, T133K, Y147R, Q154R |
| ABE9.16_heterodimer | E25F, V82S, Y123H, Y147R, Q154R |
| ABE9.17_heterodimer | V82S, Y123H, P124W, Y147R, Q154R |
| ABE9.18_heterodimer | L51W, V82S, Y123H, C146R, Y147R, Q154R |
| ABE9.19_heterodimer | P54C, V82S, Y123H, Y147R, Q154R |
| ABE9.2_heterodimer | Y73S, V82S, Y123H, Y147R, Q154R |
| ABE9.21_heterodimer | N38G, V82T, Y123H, Y147R, Q154R |
| ABE9.22_heterodimer | R23H, V82S, Y123H, Y147R, Q154R |
| ABE9.23_heterodimer | R21N, V82S, Y123H, Y147R, Q154R |
| ABE9.24_heterodimer | V82S, Y123H, Y147R, Q154R, A158K |
| ABE9.25_heterodimer | N72K, V82S, Y123H, D139L, Y147R, Q154R, |
| ABE9.26_heterodimer | E25F, V82S, Y123H, D139M, Y147R, Q154R |
| ABE9.27_heterodimer | M70V, V82S, M94V, Y123H, Y147R, Q154R |
| ABE9.28_heterodimer | Q71M, V82S, Y123H, Y147R, Q154R |
| ABE9.29_monomer | E25F_I76Y_V82S_Y123H_Y147R_Q154R |
| ABE9.30_monomer | I76Y_V82T_Y123H_Y147R_Q154R |
| ABE9.31_monomer | N38G_I76Y_V82S_Y123H_Y147R_Q154R |
| ABE9.32_monomer | N38G_I76Y_V82T_Y123H_Y147R_Q154R |
| ABE9.33_monomer | R23H_I76Y_V82S_Y123H_Y147R_Q154R |
| ABE9.34_monomer | P54C_I76Y_V82S_Y123H_Y147R_Q154R |
| ABE9.35_monomer | R21N_I76Y_V82S_Y123H_Y147R_Q154R |
| ABE9.36_monomer | I76Y_V82S_Y123H_D138M_Y147R_Q154R |
| ABE9.37_monomer | Y72S_I76Y_V82S_Y123H_Y147R_Q154R |
| ABE9.38_heterodimer | E25F_I76Y_V82S_Y123H_Y147R_Q154R |
| ABE9.39_heterodimer | I76Y_V82T_Y123H_Y147R_Q154R |
| ABE9.40_heterodimer | N38G_I76Y_V82S_Y123H_Y147R_Q154R |
| ABE9.41_heterodimer | N38G_I76Y_V82T_Y123H_Y147R_Q154R |
| ABE9.42_heterodimer | R23H_I76Y_V82S_Y123H_Y147R_Q154R |
| ABE9.43_heterodimer | P54C_I76Y_V82S_Y123H_Y147R_Q154R |
| ABE9.44_heterodimer | R21N_I76Y_V82S_Y123H_Y147R_Q154R |
| ABE9.45_heterodimer | I76Y_V82S_Y123H_D138M_Y147R_Q154R |
| ABE9.46_heterodimer | Y72S_I76Y_V82S_Y123H_Y147R_Q154R |
| ABE9.47_monomer | N72K_V82S, Y123H, Y147R, Q154R |
| ABE9.48_monomer | Q71M_V82S, Y123H, Y147R, Q154R |
| ABE9.49_monomer | M70V, V82S, M94V, Y123H, Y147R, Q154R |
| ABE9.50_monomer | V82S, Y123H, T133K, Y147R, Q154R |
| ABE9.51_monomer | V82S, Y123H, T133K, Y147R, Q154R, |
| | A158K |
| ABE9.52_monomer | M70V, Q71M, N72K, V82S, Y123H, Y147R, |
| | Q154R |
| ABE9.53_heterodimer | N72K_V82S, Y123H, Y147R, Q154R |
| ABE9.54_heterodimer | Q71M_V82S, Y123H, Y147R, Q154R |
| ABE9.55_heterodimer | M70V, V82S, M94V, Y123H, Y147R, Q154R |
| ABE9.56_heterodimer | V82S, Y123H, T133K, Y147R, Q154R |
| ABE9.57_heterodimer | V82S, Y123H, T133K, Y147R, Q154R, |
| | A158K |
| ABE9.58_heterodimer | M70V, Q71M, N72K, V82S, Y123H, Y147R, |
| | Q154R |

[0823] In some embodiments, the base editor includes an adenosine deaminase variant comprising an amino acid sequence, which contains alterations relative to an ABE 7*10 reference sequence, as described herein. The term “monomer” as used in Table 16.1 refers to a monomeric form of TadA*7.10 comprising the alterations described. The term “heterodimer” as used in Table 16.1 refers to the specified wild-type E. coli TadA adenosine deaminase fused to a TadA*7.10 comprising the alterations as described.

TABLE 16.1
Adenosine Deaminase Base Editor Variants

| | Adenosine | |
|---|---|---|
| ABE | Deaminase | Adenosine Deaminase Description |
| ABE-605m | MSP605 | monomer_TadA*7.10 + V82G + Y147T + Q154S |
| ABE-680m | MSP680 | monomer_TadA*7.10 + I76Y + V82G + Y147T + Q154S |
| ABE-823m | MSP823 | monomer_TadA*7.10 + L36H + V82G + Y147T + Q154S + |
| | | N157K |
| ABE-824m | MSP824 | monomer_TadA*7.10 + V82G + Y147D + F149Y + Q154S + |
| | | D167N |
| ABE-825m | MSP825 | monomer_TadA*7.10 + L36H + V82G + Y147D + F149Y + |
| | | Q154S + N157K + D167N |
| ABE-827m | MSP827 | monomer_TadA*7.10 + L36H + I76Y + V82G + Y147T + |
| | | Q154S + N157K |
| ABE-828m | MSP828 | monomer_TadA*7.10 + I76Y + V82G + Y147D + F149Y + |
| | | Q154S + D167N |
| ABE-829m | MSP829 | monomer_TadA*7.10 + L36H + I76Y + V82G + Y147D + |
| | | F149Y + Q154S + N157K + D167N |
| ABE-605d | MSP605 | heterodimer_(WT) + (TadA*7.10 + V82G + Y147T + Q154S) |
| ABE-680d | MSP680 | heterodimer_(WT) + (TadA*7.10 + 176Y + V82G + Y147T + |
| | | Q154S) |
| ABE-823d | MSP823 | heterodimer_(WT) + (TadA*7.10 + L36H + V82G + Y147T + |
| | | Q154S + N157K) |
| ABE-824d | MSP824 | heterodimer_(WT) + (TadA*7.10 + V82G + Y147D + F149Y + |
| | | Q154S + D167N) |
| ABE-825d | MSP825 | heterodimer_(WT) + (TadA*7.10 + L36H + V82G + Y147D + |
| | | F149Y + Q154S + N157K + D167N) |
| ABE-827d | MSP827 | heterodimer_(WT) + (TadA*7.10 + L36H + I76Y + V82G + |
| | | Y147T + Q154S + N157K) |
| ABE-828d | MSP828 | heterodimer_(WT) + (TadA*7.10 + I76Y + V82G + Y147D + |
| | | F149Y + Q154S + D167N) |
| ABE-829d | MSP829 | heterodimer_(WT) + (TadA*7.10 + L36H + I76Y + V82G + |
| | | Y147D + F149Y + Q154S + N157K + D167N) |

[0824] In some embodiments, the base editor comprises a domain comprising all or a portion of a uracil glycosylase inhibitor (UGI). In some embodiments, the base editor comprises a domain comprising all or a portion of a nucleic acid polymerase. In some embodiments, a base editor can comprise as a domain all or a portion of a nucleic acid polymerase (NAP). For example, a base editor can comprise all or a portion of a eukaryotic NAP. In some embodiments, a NAP or portion thereof incorporated into a base editor is a DNA polymerase. In some embodiments, a NAP or portion thereof incorporated into a base editor has translesion polymerase activity. In some embodiments, a NAP or portion thereof incorporated into a base editor is a translesion DNA polymerase. In some embodiments, a NAP or portion thereof incorporated into a base editor is a Rev7, Rev1 complex, polymerase iota, polymerase kappa, or polymerase eta. In some embodiments, a NAP or portion thereof incorporated into a base editor is a eukaryotic polymerase alpha, beta, gamma, delta, epsilon, gamma, eta, iota, kappa, lambda, mu, or nu component. In some embodiments, a NAP or portion thereof incorporated into a base editor comprises an amino acid sequence that is at least 75%, 80%, 85%, 90%, 95%, 96%, 97%, 98%, 99%, or 99.5% identical to a nucleic acid polymerase (e.g., a translesion DNA polymerase). In some embodiments, a nucleic acid polymerase or portion thereof incorporated into a base editor is a translesion DNA polymerase.

[0825] In some embodiments, a domain of the base editor can comprise multiple domains. For example, the base editor comprising a polynucleotide programmable nucleotide binding domain derived from Cas9 can comprise a REC lobe and an NUC lobe corresponding to the REC lobe and NUC lobe of a wild-type or natural Cas9. In another example, the base editor can comprise one or more of a RuvCI domain, BH domain, REC1 domain, REC2 domain, RuvCII domain, L1 domain, HNH domain, L2 domain, RuvCIII domain, WED domain, TOPO domain or CTD domain. In some embodiments, one or more domains of the base editor comprise a mutation (e.g., substitution, insertion, deletion) relative to a wild-type version of a polypeptide comprising the domain. For example, an HNH domain of a polynucleotide programmable DNA binding domain can comprise an H840A substitution. In another example, a RuvCI domain of a polynucleotide programmable DNA binding domain can comprise a D10A substitution.

[0826] Different domains (e.g., adjacent domains) of the base editor disclosed herein can be connected to each other with or without the use of one or more linker domains (e.g., an XTEN linker domain). In some embodiments, a linker domain can be a bond (e.g., covalent bond), chemical group, or a molecule linking two molecules or moieties, e.g., two domains of a fusion protein, such as, for example, a first domain (e.g., Cas9-derived domain) and a second domain (e.g., an adenosine deaminase domain or a cytidine deaminase domain). In some embodiments, a linker is a covalent bond (e.g., a carbon-carbon bond, disulfide bond, carbon-hetero atom bond, etc.). In certain embodiments, a linker is a carbon nitrogen bond of an amide linkage. In certain embodiments, a linker is a cyclic or acyclic, substituted or unsubstituted, branched or unbranched aliphatic or heteroaliphatic linker. In certain embodiments, a linker is polymeric (e.g., polyethylene, polyethylene glycol, polyamide, polyester, etc.). In certain embodiments, a linker comprises a monomer, dimer, or polymer of aminoalkanoic acid. In some embodiments, a linker comprises an aminoalkanoic acid (e.g., glycine, ethanoic acid, alanine, beta-alanine, 3-aminopropanoic acid, 4-aminobutanoic acid, 5-pentanoic acid, etc.). In some embodiments, a linker comprises a monomer, dimer, or polymer of aminohexanoic acid (Ahx). In certain embodiments, a linker is based on a carbocyclic moiety (e.g., cyclopentane, cyclohexane). In other embodiments, a linker comprises a polyethylene glycol moiety (PEG). In certain embodiments, a linker comprises an aryl or heteroaryl moiety. In certain embodiments, the linker is based on a phenyl ring. A linker can include functionalized moieties to facilitate attachment of a nucleophile (e.g., thiol, amino) from the peptide to the linker. Any electrophile can be used as part of the linker. Exemplary electrophiles include, but are not limited to, activated esters, activated amides, Michael acceptors, alkyl halides, aryl halides, acyl halides, and isothiocyanates. In some embodiments, a linker joins a gRNA binding domain of an RNA-programmable nuclease, including a Cas9 nuclease domain, and the catalytic domain of a nucleic acid editing protein. In some embodiments, a linker joins a dCas9 and a second domain (e.g., UGI, etc.).

### Linkers

[0827] In certain embodiments, linkers may be used to link any of the peptides or peptide domains of the invention. The linker may be as simple as a covalent bond, or it may be a polymeric linker many atoms in length. In certain embodiments, the linker is a polypeptide or based on amino acids. In other embodiments, the linker is not peptide-like. In certain embodiments, the linker is a covalent bond (e.g., a carbon-carbon bond, disulfide bond, carbon-heteroatom bond, etc.). In certain embodiments, the linker is a carbon-nitrogen bond of an amide linkage. In certain embodiments, the linker is a cyclic or acyclic, substituted or unsubstituted, branched or unbranched aliphatic or heteroaliphatic linker. In certain embodiments, the linker is polymeric (e.g., polyethylene, polyethylene glycol, polyamide, polyester, etc.). In certain embodiments, the linker comprises a monomer, dimer, or polymer of aminoalkanoic acid. In certain embodiments, the linker comprises an aminoalkanoic acid (e.g., glycine, ethanoic acid, alanine, beta-alanine, 3-aminopropanoic acid, 4-aminobutanoic acid, 5-pentanoic acid, etc.). In certain embodiments, the linker comprises a monomer, dimer, or polymer of aminohexanoic acid (Ahx). In certain embodiments, the linker is based on a carbocyclic moiety (e.g., cyclopentane, cyclohexane). In other embodiments, the linker comprises a polyethylene glycol moiety (PEG). In other embodiments, the linker comprises amino acids. In certain embodiments, the linker comprises a peptide. In certain embodiments, the linker comprises an aryl or heteroaryl moiety. In certain embodiments, the linker is based on a phenyl ring. The linker may include functionalized moieties to facilitate attachment of a nucleophile (e.g., thiol, amino) from the peptide to the linker. Any electrophile may be used as part of the linker. Exemplary electrophiles include, but are not limited to, activated esters, activated amides, Michael acceptors, alkyl halides, aryl halides, acyl halides, and isothiocyanates.

[0828] Typically, a linker is positioned between, or flanked by, two groups, molecules, or other moieties and connected to each one via a covalent bond, thus connecting the two. In some embodiments, a linker is an amino acid or a plurality of amino acids (e.g., a peptide or protein). In some embodiments, a linker is an organic molecule, group, polymer, or chemical moiety. In some embodiments, a linker is 2-100 amino acids in length, for example, 2, 3, 4, 5,6,7, 8,9, 10, 11, 12, 13, 14, 15, 16, 17, 18, 19, 20, 21, 22, 23, 24, 25, 26, 27, 28, 29, 30, 30-35, 35-40, 40-45, 45-50, 50-60, 60-70, 70-80, 80-90, 90-100, 100-150, or 150-200 amino acids in length. In some embodiments, the linker is about 3 to about 104 (e.g., 5, 6, 7, 8, 9, 10, 11, 12, 13, 14, 15, 16, 17, 18, 19, 20, 21, 22, 23, 24, 25, 26, 27, 28, 29, 30, 31, 32, 33, 34, 35, 36, 37, 38, 39, 40, 41, 42, 43, 44, 45, 46, 47, 48, 49, 50, 55, 60, 65, 70, 75, 80, 85, 90, 95, or 100) amino acids in length. Longer or shorter linkers are also contemplated.

[0829] In some embodiments, any of the fusion proteins provided herein, comprise a cytidine or adenosine deaminase and a Cas9 domain that are fused to each other via a linker. Various linker lengths and flexibilities between the cytidine or adenosine deaminase and the Cas9 domain can be employed (e.g., ranging from very flexible linkers of the form (GGGS)n (SEQ ID NO: 246), (GGGGS)n (SEQ ID NO: 247), and (G)n to more rigid linkers of the form (EAAAK)n (SEQ ID NO: 248), (SGGS)n (SEQ ID NO: 355), SGSETPGTSESATPES (SEQ ID NO: 249) (see, e.g., Guilinger J P, et al. Fusion of catalytically inactive Cas9 to FokI nuclease improves the specificity of genome modification. Nat. Biotechnol. 2014; 32(6): 577-82; the entire contents are incorporated herein by reference) and (XP)n) in order to achieve the optimal length for activity for the cytidine or adenosine deaminase nucleobase editor. In some embodiments, n is 1, 2, 3, 4, 5, 6, 7, 8, 9, 10, 11, 12, 13, 14, or 15. In some embodiments, the linker comprises a (GGS)n motif, wherein n is 1, 3, or 7. In some embodiments, cytidine deaminase or adenosine deaminase and the Cas9 domain of any of the fusion proteins provided herein are fused via a linker comprising the amino acid sequence SGSETPGTSESATPES (SEQ ID NO: 249), which can also be referred to as the XTEN linker.

[0830] In some embodiments, the domains of the base editor are fused via a linker that comprises the amino acid sequence of:

(SEQ ID NO: 356)
SGGSSGSETPGTSESATPESSGGS,
(SEQ ID NO: 357)
SGGSSGGSSGSETPGTSESATPESSGGSSGGS,
or
(SEQ ID NO: 358)
GGSGGSPGSPAGSPTSTEEGTSESATPESGPGTSTEPSEGSAPGSPAGS
PTSTEEGTSTEPSEGSAPGTSTEPSEGSAPGTSESATPESGPGSEPATS
GGSGGS.

[0831] In some embodiments, domains of the base editor are fused via a linker comprising the amino acid sequence SGSETPGTSESATPES (SEQ ID NO: 249), which may also be referred to as the XTEN linker. In some embodiments, a linker comprises the amino acid sequence SGGS. In some embodiments, the linker is 24 amino acids in length. In some embodiments, the linker comprises the amino acid sequence SGGSSGGSSGSETPGTSESATPES (SEQ ID NO: 359). In some embodiments, the linker is 40 amino acids in length. In some embodiments, the linker comprises the amino acid sequence:

(SEQ ID NO: 360)
SGGSSGGSSGSETPGTSESATPESSGGSSGGSSGGSSGGS.

In some embodiments, the linker is 64 amino acids in length. In some embodiments, the linker comprises the amino acid sequence.

(SEQ ID NO: 361)
SGGSSGGSSGSETPGTSESATPESSGGSSGGSSGGSSGGSSGSETPGTS
ESATPESSGGSSGGS.

In some embodiments, the linker is 92 amino acids in length. In some embodiments, the linker comprises the amino acid sequence:

(SEQ ID NO: 362)
PGSPAGSPTSTEEGTSESATPESGPGTSTEPSEGSAPGSPAGSPTSTEE
GTSTEPSEGSAPGTSTEPSEGSAPGTSESATPESGPGSEPATS.

[0832] In some embodiments, a linker comprises a plurality of proline residues and is 5-21, 5-14, 5-9, 5-7 amino acids in length, e.g., PAPAP (SEQ ID NO: 363), PAPAPA (SEQ ID NO: 364), PAPAPAP (SEQ ID NO: 365), PAPAPAPA (SEQ ID NO: 366), P(AP)4 (SEQ ID NO: 367), P(AP)7 (SEQ ID NO: 368), P(AP)10 (SEQ ID NO: 369) (see, e.g., Tan J, Zhang F, Karcher D, Bock R. Engineering of high-precision base editors for site-specific single nucleotide replacement. Nat Commun. 2019 Jan. 25; 10(1):439; the entire contents are incorporated herein by reference). Such proline-rich linkers are also termed “rigid” linkers.

[0833] In another embodiment, the base editor system comprises a component (protein) that interacts non-covalently with a deaminase (DNA deaminase), e.g., an adenosine or a cytidine deaminase, and transiently attracts the adenosine or cytidine deaminase to the target nucleobase in a target polynucleotide sequence for specific editing, with minimal or reduced bystander or target-adjacent effects. Such a non-covalent system and method involving deaminase-interacting proteins serves to attract a DNA deaminase to a particular genomic target nucleobase and decouples the events of on-target and target-adjacent editing, thus enhancing the achievement of more precise single base substitution mutations. In an embodiment, the deaminase-interacting protein binds to the deaminase (e.g., adenosine deaminase or cytidine deaminase) without blocking or interfering with the active (catalytic) site of the deaminase from engaging the target nucleobase (e.g., adenosine or cytidine, respectively). Such as system, termed “MagnEdit,” involves interacting proteins tethered to a Cas9 and gRNA complex and can attract a co-expressed adenosine or cytidine deaminase (either exogenous or endogenous) to edit a specific genomic target site, and is described in McCann, J. et al., 2020, “MagnEdit—interacting factors that recruit DNA-editing enzymes to single base targets,” Life-Science-Alliance, Vol. 3, No. 4 (e201900606), (doi 10.26508/Isa.201900606), the contents of which are incorporated by reference herein in their entirety. In an embodiment, the DNA deaminase is an adenosine deaminase variant (e.g., TadA*8) as described herein.

[0834] In another embodiment, a system called “Suntag,” involves non-covalently interacting components used for recruiting protein (e.g., adenosine deaminase or cytidine deaminase) components, or multiple copies thereof, of base editors to polynucleotide target sites to achieve base editing at the site with reduced adjacent target editing, for example, as described in Tanenbaum, M. E. et al., “A protein tagging system for signal amplification in gene expression and fluorescence imaging,” Cell. 2014 Oct. 23; 159(3): 635-646. doi:10.1016/j.cell.2014.09.039; and in Huang, Y.-H. et al., 2017, “DNA epigenome editing using CRISPR-Cas SunTag-directed DNMT3A,” Genome Biol 18: 176. doi:10.1186/s13059-017-1306-z, the contents of each of which are incorporated by reference herein in their entirety. In an embodiment, the DNA deaminase is an adenosine deaminase variant (e.g., TadA*8) as described herein.

Nucleic Acid Programmable DNA Binding Proteins with Guide RNAs

[0835] Provided herein are compositions and methods for base editing in cells (e.g., immune cells (e.g., T- or NK-cells)). Further provided herein are compositions comprising a guide polynucleic acid sequence, e.g. a guide RNA sequence, or a combination of 2, 3, 4, 5, 6, 7, 8, 9, 10, 11, 12, 13, 14, 15, 16, 17, 18, 19, 20, or more guide RNAs as provided herein. In some embodiments, a composition for base editing as provided herein further comprises a polynucleotide that encodes a base editor, e.g. a C-base editor or an A-base editor. For example, a composition for base editing may comprise a mRNA sequence encoding a BE, a BE4, an ABE, and a combination of one or more guide RNAs as provided. A composition for base editing may comprise a base editor polypeptide and a combination of one or more of any guide RNAs provided herein. Such a composition may be used to effect base editing in an immune cell (e.g., T- or NK-cell) through different delivery approaches, for example, electroporation, nucleofection, viral transduction or transfection. In some embodiments, the composition for base editing comprises an mRNA sequence that encodes a base editor and a combination of one or more guide RNA sequences provided herein for electroporation.

[0836] Some aspects of this disclosure provide complexes comprising any of the fusion proteins provided herein, and a guide RNA bound to a nucleic acid programmable DNA binding protein (napDNAbp) domain (e.g., a Cas9 (e.g., a dCas9, a nuclease active Cas9, or a Cas9 nickase) or Cas12) of the fusion protein. These complexes are also termed ribonucleoproteins (RNPs). In some embodiments, the guide nucleic acid (e.g., guide RNA) is from 15-100 nucleotides long and comprises a sequence of at least 10 contiguous nucleotides that is complementary to a target sequence. In some embodiments, the guide RNA is 15, 16, 17, 18, 19, 20, 21, 22, 23, 24, 25, 26, 27, 28, 29, 30, 31, 32, 33, 34, 35, 36, 37, 38, 39, 40, 41, 42, 43, 44, 45, 46, 47, 48, 49, or 50 nucleotides long. In some embodiments, the guide RNA comprises a sequence of 15, 16, 17, 18, 19, 20, 21, 22, 23, 24, 25, 26, 27, 28, 29, 30, 31, 32, 33, 34, 35, 36, 37, 38, 39, or 40 contiguous nucleotides that is complementary to a target sequence. In some embodiments, the target sequence is a DNA sequence. In some embodiments, the target sequence is an RNA sequence. In some embodiments, the target sequence is a sequence in the genome of a mammal. In some embodiments, the target sequence is a sequence in the genome of a human. In some embodiments, the 3′ end of the target sequence is immediately adjacent to a canonical PAM sequence (NGG). In some embodiments, the 3′ end of the target sequence is immediately adjacent to a non-canonical PAM sequence (e.g., a sequence listed in Table 7 or 5′-NAA-3′). In some embodiments, the guide nucleic acid (e.g., guide RNA) is complementary to a sequence in a gene of interest (e.g., a gene associated with a disease or disorder).

[0837] Some aspects of this disclosure provide methods of using the fusion proteins, or complexes provided herein. For example, some aspects of this disclosure provide methods comprising contacting a DNA molecule with any of the fusion proteins provided herein, and with at least one guide RNA, wherein the guide RNA is about 15-100 nucleotides long and comprises a sequence of at least 10 contiguous nucleotides that is complementary to a target sequence. In some embodiments, the 3′ end of the target sequence is immediately adjacent to an AGC, GAG, TTT, GTG, or CAA sequence. In some embodiments, the 3′ end of the target sequence is immediately adjacent to an NGA, NGCG, NGN, NNGRRT, NNNRRT, NGCG, NGCN, NGTN, NGTN, NGTN, or 5′ (TTTV) sequence. In some embodiments, the 3′ end of the target sequence is immediately adjacent to an e.g., TTN, DTTN, GTTN, ATTN, ATTC, DTTNT, WTTN, HATY, TTTN, TTTV, TTTC, TG, RTR,orYTN PAM site.

[0838] It will be understood that the numbering of the specific positions or residues in the respective sequences depends on the particular protein and numbering scheme used. Numbering might differ, e.g., in precursors of a mature protein and the mature protein itself, and differences in sequences from species to species may affect numbering. One of skill in the art will be able to identify the respective residue in any homologous protein and in the respective encoding nucleic acid by methods well known in the art, e.g., by sequence alignment and determination of homologous residues.

[0839] It will be apparent to those of skill in the art that in order to target any of the fusion proteins disclosed herein, to a target site, e.g., a site comprising a mutation to be edited, it is typically necessary to co-express the fusion protein together with a guide RNA. As explained in more detail elsewhere herein, a guide RNA typically comprises a tracrRNA framework allowing for napDNAbp (e.g., Cas9 or Cas12) binding, and a guide sequence, which confers sequence specificity to the napDNAbp:nucleic acid editing enzyme/domain fusion protein. Alternatively, the guide RNA and tracrRNA may be provided separately, as two nucleic acid molecules. In some embodiments, the guide RNA comprises a structure, wherein the guide sequence comprises a sequence that is complementary to the target sequence. The guide sequence is typically 20 nucleotides long. The sequences of suitable guide RNAs for targeting napDNAbp:nucleic acid editing enzyme/domain fusion proteins to specific genomic target sites will be apparent to those of skill in the art based on the instant disclosure. Such suitable guide RNA sequences typically comprise guide sequences that are complementary to a nucleic sequence within 50 nucleotides upstream or downstream of the target nucleotide to be edited. Some exemplary guide RNA sequences suitable for targeting any of the provided fusion proteins to specific target sequences are provided herein.

[0840] Distinct portions of sgRNA are predicted to form various features that interact with Cas9 (e.g., SpyCas9) and/or the DNA target. Six conserved modules have been identified within native crRNA:tracrRNA duplexes and single guide RNAs (sgRNAs) that direct Cas9 endonuclease activity (see Briner et al., Guide RNA Functional Modules Direct Cas9 Activity and Orthogonality Mol Cell. 2014 Oct. 23; 56(2):333-339). The six modules include the spacer responsible for DNA targeting, the upper stem, bulge, lower stem formed by the CRISPR repeat:tracrRNA duplex, the nexus, and hairpins from the 3′ end of the tracrRNA. The upper and lower stems interact with Cas9 mainly through sequence-independent interactions with the phosphate backbone. In some embodiments, the upper stem is dispensable. In some embodiments, the conserved uracil nucleotide sequence at the base of the lower stem is dispensable. The bulge participates in specific side-chain interactions with the Rec domain of Cas9. The nucleobase of U44 interacts with the side chains of Tyr 325 and His 328, while G43 interacts with Tyr 329. The nexus forms the core of the sgRNA:Cas9 interactions and lies at the intersection between the sgRNA and both Cas9 and the target DNA. The nucleobases of A51 and A52 interact with the side chain of Phe 1105; U56 interacts with Arg 457 and Asn 459; the nucleobase of U59 inserts into a hydrophobic pocket defined by side chains of Arg 74, Asn 77, Pro 475, Leu 455, Phe 446, and Ile 448; C60 interacts with Leu 455, Ala 456, and Asn 459, and C61 interacts with the side chain of Arg 70, which in turn interacts with C15. In some embodiments, one or more of these mutations are made in the bulge and/or the nexus of a sgRNA for a Cas9 (e.g., spyCas9) to optimize sgRNA:Cas9 interactions.

[0841] Moreover, the tracrRNA nexus and hairpins are critical for Cas9 pairing and can be swapped to cross orthogonality barriers separating disparate Cas9 proteins, which is instrumental for further harnessing of orthogonal Cas9 proteins. In some embodiments, the nexus and hairpins are swapped to target orthogonal Cas9 proteins. In some embodiments, a sgRNA is dispensed of the upper stem, hairpin 1, and/or the sequence flexibility of the lower stem to design a guide RNA that is more compact and conformationally stable. In some embodiments, the modules are modified to optimize multiplex editing using a single Cas9 with various chimeric guides or by concurrently using orthogonal systems with different combinations of chimeric sgRNAs. Details regarding guide functional modules and methods thereof are described, for example, in Briner et al., Guide RNA Functional Modules Direct Cas9 Activity and Orthogonality Mol Cell. 2014 Oct. 23; 56(2):333-339, the contents of which is incorporated by reference herein in its entirety.

[0842] The domains of the base editor disclosed herein can be arranged in any order. Non-limiting examples of a base editor comprising a fusion protein comprising e.g., a polynucleotide-programmable nucleotide-binding domain (e.g., Cas9 or Cas12) and a deaminase domain (e.g., cytidine or adenosine deaminase) can be arranged as follows:
[0843] NH2-[nucleobase editing domain]-Linker1-[nucleobase editing domain]-COOH;
[0844] NH2-[deaminase]-Linker1-[nucleobase editing domain]-COOH;
[0845] NH2-[deaminase]-Linker1-[nucleobase editing domain]-Linker2-[UGI]-COOH;
[0846] NH2-[deaminase]-Linker1-[nucleobase editing domain]-COOH;
[0847] NH2-[adenosine deaminase]-Linker1-[nucleobase editing domain]-COOH;
[0848] NH2-[nucleobase editing domain]-[deaminase]-COOH;
[0849] NH2-[deaminase]-[nucleobase editing domain]-[inosine BER inhibitor]-COOH;
[0850] NH2-[deaminase]-[inosine BER inhibitor]-[nucleobase editing domain]-COOH;
[0851] NH2-[inosine BER inhibitor]-[deaminase]-[nucleobase editing domain]-COOH;
[0852] NH2-[nucleobase editing domain]-[deaminase]-[inosine BER inhibitor]-COOH;
[0853] NH2-[nucleobase editing domain]-[inosine BER inhibitor]-[deaminase]-COOH;
[0854] NH2-[inosine BER inhibitor]-[nucleobase editing domain]-[deaminase]-COOH;
[0855] NH2-[nucleobase editing domain]-Linker1-[deaminase]-Linker2-[nucleobase editing domain]-COOH;
[0856] NH2-[nucleobase editing domain]-Linker1-[deaminase]-[nucleobase editing domain]-COOH;
[0857] NH2-[nucleobase editing domain]-[deaminase]-Linker2-[nucleobase editing domain]-COOH;
[0858] NH2-[nucleobase editing domain]-[deaminase]-[nucleobase editing domain]-COOH;
[0859] NH2-[nucleobase editing domain]-Linker1-[deaminase]-Linker2-[nucleobase editing domain]-[inosine BER inhibitor]-COOH;
[0860] NH2-[nucleobase editing domain]-Linker1-[deaminase]-[nucleobase editing domain]-[inosine BER inhibitor]-COOH;
[0861] NH2-[nucleobase editing domain]-[deaminase]-Linker2-[nucleobase editing domain]-[inosine BER inhibitor]-COOH;
[0862] NH2-[nucleobase editing domain]-[deaminase]-[nucleobase editing domain]-[inosine BER inhibitor]-COOH;
[0863] NH2-[inosine BER inhibitor]-[nucleobase editing domain]-Linker1-[deaminase]-Linker2-[nucleobase editing domain]-COOH;
[0864] NH2-[inosine BER inhibitor]-[nucleobase editing domain]-Linker1-[deaminase]-[nucleobase editing domain]-COOH;
[0865] NH2-[inosine BER inhibitor]-[nucleobase editing domain]-[deaminase]-Linker2-[nucleobase editing domain]-COOH; or
[0866] NH2-[inosine BER inhibitor]NH2-[nucleobase editing domain]-[deaminase]-[nucleobase editing domain]-COOH.

[0867] In some embodiments, the base editing fusion proteins provided herein need to be positioned at a precise location, for example, where a target base is placed within a defined region (e.g., a “deamination window”). In some embodiments, a target can be within a 4-base region. In some embodiments, such a defined target region can be approximately 15 bases upstream of the PAM. See Komor, A. C., et al., “Programmable editing of a target base in genomic DNA without double-stranded DNA cleavage” Nature 533, 420-424 (2016); Gaudelli, N. M., et al., “Programmable base editing of A·T to G·C in genomic DNA without DNA cleavage” Nature 551, 464-471 (2017); and Komor, A. C., et al., “Improved base excision repair inhibition and bacteriophage Mu Gam protein yields C:G-to-T:A base editors with higher efficiency and product purity” Science Advances 3:eaao4774 (2017), the entire contents of which are hereby incorporated by reference.

[0868] A defined target region can be a deamination window. A deamination window can be the defined region in which a base editor acts upon and deaminates a target nucleotide. In some embodiments, the deamination window is within a 2, 3, 4, 5, 6, 7, 8, 9, or 10 base regions. In some embodiments, the deamination window is 5, 6, 7, 8, 9, 10, 11, 12, 13, 14, 15, 16, 17, 18, 19, 20, 21, 22, 23, 24, or 25 bases upstream of the PAM.

[0869] The base editors of the present disclosure can comprise any domain, feature or amino acid sequence which facilitates the editing of a target polynucleotide sequence. For example, in some embodiments, the base editor comprises a nuclear localization sequence (NLS). In some embodiments, an NLS of the base editor is localized between a deaminase domain and a napDNAbp domain. In some embodiments, an NLS of the base editor is localized C-terminal to a napDNAbp domain.

[0870] Non-limiting examples of protein domains which can be included in the fusion protein include a deaminase domain (e.g., adenosine deaminase or cytidine deaminase), a uracil glycosylase inhibitor (UGI) domain, epitope tags, reporter gene sequences, and/or protein domains having one or more of the activities described herein.

[0871] A domain may be detected or labeled with an epitope tag, a reporter protein, other binding domains. Non-limiting examples of epitope tags include histidine (His) tags, V5 tags, FLAG tags, influenza hemagglutinin (HA) tags, Myc tags, VSV-G tags, and thioredoxin (Trx) tags. Examples of reporter genes include, but are not limited to, glutathione-5-transferase (GST), horseradish peroxidase (HRP), chloramphenicol acetyltransferase (CAT) beta-galactosidase, beta-glucuronidase, luciferase, green fluorescent protein (GFP), HcRed, DsRed, cyan fluorescent protein (CFP), yellow fluorescent protein (YFP), and autofluorescent proteins including blue fluorescent protein (BFP). Additional protein sequences can include amino acid sequences that bind DNA molecules or bind other cellular molecules, including but not limited to maltose binding protein (MBP), S-tag, Lex A DNA binding domain (DBD) fusions, GAL4 DNA binding domain fusions, and herpes simplex virus (HSV) BP16 protein fusions.

### Methods of Using Fusion Proteins Comprising a Cytidine or Adenosine Deaminase and a Cas9 Domain

[0872] Some aspects of this disclosure provide methods of using the fusion proteins, or complexes provided herein. For example, some aspects of this disclosure provide methods comprising contacting a DNA molecule with any of the fusion proteins provided herein, and with at least one guide RNA described herein.

[0873] In some embodiments, a fusion protein of the invention is used for editing a target gene or polynucleotide sequence of interest (e.g., an A2AR, A2BR, HIF1α, HIF1α.I3 target gene). In particular, a cytidine deaminase or adenosine deaminase nucleobase editor described herein is capable of making multiple mutations within a target sequence. These mutations may affect the function or expression of the target. For example, when a cytidine deaminase or adenosine deaminase nucleobase editor is used to target a regulatory region the function of the regulatory region is altered and the expression of the downstream protein is reduced or eliminated.

[0874] It will be understood that the numbering of the specific positions or residues in the respective sequences depends on the particular protein and numbering scheme used. Numbering might be different, e.g., in precursors of a mature protein and the mature protein itself, and differences in sequences from species to species may affect numbering. One of skill in the art will be able to identify the respective residue in any homologous protein and in the respective encoding nucleic acid by methods well known in the art, e.g., by sequence alignment and determination of homologous residues.

[0875] It will be apparent to those of skill in the art that in order to target any of the fusion proteins comprising a Cas9 domain and a cytidine or adenosine deaminase, as disclosed herein, to a target site, e.g., a site comprising a mutation to be edited, it is typically necessary to co-express the fusion protein together with a guide RNA, e.g., an sgRNA. As explained in more detail elsewhere herein, a guide RNA typically comprises a tracrRNA framework allowing for Cas9 binding, and a guide sequence, which confers sequence specificity to the Cas9:nucleic acid editing enzyme/domain fusion protein. Alternatively, the guide RNA and tracrRNA may be provided separately, as two nucleic acid molecules. In some embodiments, the guide RNA comprises a structure, wherein the guide sequence comprises a sequence that is complementary to the target sequence. The guide sequence is typically 20 nucleotides long. The sequences of suitable guide RNAs for targeting Cas9:nucleic acid editing enzyme/domain fusion proteins to specific genomic target sites will be apparent to those of skill in the art based on the instant disclosure. Such suitable guide RNA sequences typically comprise guide sequences that are complementary to a nucleic sequence within 50 nucleotides upstream or downstream of the target nucleotide to be edited. Some exemplary guide RNA sequences suitable for targeting any of the provided fusion proteins to specific target sequences are provided herein.

### Base Editor Efficiency

[0876] In some embodiments, the purpose of the methods provided herein is to alter a gene (e.g., A2AR, A2BR, HIF1α, HIF1α.I3 polynucleotides) via base editing. The nucleobase editing proteins provided herein can be used for gene editing-based human therapeutics in vitro or in vivo. It will be understood by the skilled artisan that the nucleobase editing proteins provided herein, e.g., the fusion proteins comprising a polynucleotide programmable nucleotide binding domain (e.g., Cas9) and a nucleobase editing domain (e.g., an adenosine deaminase domain or a cytidine deaminase domain) can be used to edit a nucleotide from A to G or C to T.

[0877] Advantageously, base editing systems as provided herein provide genome editing without generating double-strand DNA breaks, without requiring a donor DNA template, and without inducing an excess of stochastic insertions and deletions as CRISPR may do. In some embodiments, the present disclosure provides base editors that efficiently generate an intended mutation, such as a STOP codon, in a nucleic acid (e.g., a nucleic acid within a genome of a subject) without generating a significant number of unintended mutations, such as unintended point mutations. In some embodiments, an intended mutation is a mutation that is generated by a specific base editor (e.g., adenosine base editor or cytidine base editor) bound to a guide polynucleotide (e.g., gRNA), specifically designed to generate the intended mutation. In some embodiments, the intended mutation is in a gene associated with a target antigen associated with a disease or disorder, e.g., cancer, neoplasia, solid tumor. In some embodiments, the intended mutation is an adenine (A) to guanine (G) point mutation (e.g., SNP) in a gene associated with a target antigen associated with a disease or disorder, e.g. cancer, neoplasia, solid tumor. In some embodiments, the intended mutation is an adenine (A) to guanine (G) point mutation within the coding region or non-coding region of a gene (e.g., regulatory region or element). In some embodiments, the intended mutation is a cytosine (C) to thymine (T) point mutation (e.g., SNP) in a gene associated with a target antigen associated with a disease or disorder, e.g., cancer, neoplasia, solid tumor. In some embodiments, the intended mutation is a cytosine (C) to thymine (T) point mutation within the coding region or non-coding region of a gene (e.g., regulatory region or element). In some embodiments, the intended mutation is a point mutation that generates a STOP codon, for example, a premature STOP codon within the coding region of a gene. In some embodiments, the intended mutation is a mutation that eliminates a stop codon.

[0878] The base editors of the invention advantageously modify a specific nucleotide base encoding a protein without generating a significant proportion of indels. An “indel”, as used herein, refers to the insertion or deletion of a nucleotide base within a nucleic acid. Such insertions or deletions can lead to frame shift mutations within a coding region of a gene. In some embodiments, it is desirable to generate base editors that efficiently modify (e.g. mutate) a specific nucleotide within a nucleic acid, without generating a large number of insertions or deletions (i.e., indels) in the nucleic acid. In some embodiments, it is desirable to generate base editors that efficiently modify (e.g. mutate or methylate) a specific nucleotide within a nucleic acid, without generating a large number of insertions or deletions (i.e., indels) in the nucleic acid. In certain embodiments, any of the base editors provided herein can generate a greater proportion of intended modifications (e.g., methylations) versus indels. In certain embodiments, any of the base editors provided herein can generate a greater proportion of intended modifications (e.g., mutations) versus indels.

[0879] In some embodiments, the base editors provided herein are capable of generating a ratio of intended mutations to indels (i.e., intended point mutations:unintended point mutations) that is greater than 1:1. In some embodiments, the base editors provided herein are capable of generating a ratio of intended mutations to indels that is at least 1.5:1, at least 2:1, at least 2.5:1, at least 3:1, at least 3.5:1, at least 4:1, at least 4.5:1, at least 5:1, at least 5.5:1, at least 6:1, at least 6.5:1, at least 7:1, at least 7.5:1, at least 8:1, at least 10:1, at least 12:1, at least 15:1, at least 20:1, at least 25:1, at least 30:1, at least 40:1, at least 50:1, at least 100:1, at least 200:1, at least 300:1, at least 400:1, at least 500:1, at least 600:1, at least 700:1, at least 800:1, at least 900:1, or at least 1000:1, or more. The number of intended mutations and indels may be determined using any suitable method.

[0880] In some embodiments, the base editors provided herein can limit formation of indels in a region of a nucleic acid. In some embodiments, the region is at a nucleotide targeted by a base editor or a region within 2, 3, 4, 5, 6, 7, 8, 9, or 10 nucleotides of a nucleotide targeted by a base editor. In some embodiments, any of the base editors provided herein can limit the formation of indels at a region of a nucleic acid to less than 1%, less than 1.5%, less than 2%, less than 2.5%, less than 3%, less than 3.5%, less than 4%, less than 4.5%, less than 5%, less than 6%, less than 7%, less than 8%, less than 9%, less than 10%, less than 12%, less than 15%, or less than 20%. The number of indels formed at a nucleic acid region may depend on the amount of time a nucleic acid (e.g., a nucleic acid within the genome of a cell) is exposed to a base editor. In some embodiments, a number or proportion of indels is determined after at least 1 hour, at least 2 hours, at least 6 hours, at least 12 hours, at least 24 hours, at least 36 hours, at least 48 hours, at least 3 days, at least 4 days, at least 5 days, at least 7 days, at least 10 days, or at least 14 days of exposing a nucleic acid (e.g., a nucleic acid within the genome of a cell) to a base editor.

[0881] Some aspects of the disclosure are based on the recognition that any of the base editors provided herein are capable of efficiently generating an intended mutation in a nucleic acid (e.g. a nucleic acid within a genome of a subject) without generating a considerable number of unintended mutations (e.g., spurious off-target editing or bystander editing). In some embodiments, an intended mutation is a mutation that is generated by a specific base editor bound to a gRNA, specifically designed to generate the intended mutation. In some embodiments, the intended mutation is a mutation that generates a stop codon, for example, a premature stop codon within the coding region of a gene. In some embodiments, the intended mutation is a mutation that eliminates a stop codon. In some embodiments, the intended mutation is a mutation that alters the splicing of a gene. In some embodiments, the intended mutation is a mutation that alters the regulatory sequence of a gene (e.g., a gene promotor or gene repressor). In some embodiments, any of the base editors provided herein are capable of generating a ratio of intended mutations to unintended mutations (e.g., intended mutations:unintended mutations) that is greater than 1:1. In some embodiments, any of the base editors provided herein are capable of generating a ratio of intended mutations to unintended mutations that is at least 1.5:1, at least 2:1, at least 2.5:1, at least 3:1, at least 3.5:1, at least 4:1, at least 4.5:1, at least 5:1, at least 5.5:1, at least 6:1, at least 6.5:1, at least 7:1, at least 7.5:1, at least 8:1, at least 10:1, at least 12:1, at least 15:1, at least 20:1, at least 25:1, at least 30:1, at least 40:1, at least 50:1, at least 100:1, at least 150:1, at least 200:1, at least 250:1, at least 500:1, or at least 1000:1, or more. It should be appreciated that the characteristics of the base editors described herein may be applied to any of the fusion proteins, or methods of using the fusion proteins provided herein.

[0882] Base editing is often referred to as a “modification” or “alteration”, such as, a genetic modification, a gene modification and modification of the nucleic acid sequence and is clearly understandable based on the context that the modification is a base editing modification. A base editing modification is therefore a modification at the nucleotide base level, for example as a result of the deaminase activity discussed throughout the disclosure, which then results in a change in the gene sequence, and may affect the gene product. In essence therefore, the gene editing modification described herein may result in a modification of the gene, structurally and/or functionally, wherein the expression of the gene product may be modified, for example, the expression of the gene is knocked out; or conversely, enhanced, or, in some circumstances, the gene function or activity may be modified. Using the methods disclosed herein, a base editing efficiency may be determined as the knockdown efficiency of the gene in which the base editing is performed, wherein the base editing is intended to knockdown the expression of the gene. A knockdown level may be validated quantitatively by determining the expression level by any detection assay, such as assay for protein expression level, for example, by flow cytometry; assay for detecting RNA expression such as quantitative RT-PCR, northern blot analysis, or any other suitable assay such as pyrosequencing; and may be validated qualitatively by nucleotide sequencing reactions.

[0883] In some embodiments, the modification, e.g., single base edit results in at least 10% reduction of the gene targeted expression. In some embodiments, the base editing efficiency may result in at least 10% reduction of the gene targeted expression. In some embodiments, the base editing efficiency may result in at least 15% reduction of the gene targeted expression. In some embodiments, the base editing efficiency may result in at least 20% reduction of the gene targeted expression. In some embodiments, the base editing efficiency may result in at least 25% reduction of the gene targeted expression. In some embodiments, the base editing efficiency may result in at least 30% reduction of the gene targeted expression. In some embodiments, the base editing efficiency may result in at least 40% reduction of the gene targeted expression. In some embodiments, the base editing efficiency may result in at least 50% reduction of the gene targeted expression. In some embodiments, the base editing efficiency may result in at least 60% reduction of the targeted gene expression. In some embodiments, the base editing efficiency may result in at least 70% reduction of the targeted gene expression. In some embodiments, the expression of a target gene (e.g., A2AR, A2BR, HIF1α, HIF1α.I3) is eliminated or rendered virtually undetectable. In some embodiments, the base editing efficiency may result in at least 80% reduction of the targeted gene expression. In some embodiments, the base editing efficiency may result in at least 90% reduction of the targeted gene expression. In some embodiments, the base editing efficiency may result in at least 91% reduction of the targeted gene expression. In some embodiments, the base editing efficiency may result in at least 92% reduction of the targeted gene expression. In some embodiments, the base editing efficiency may result in at least 93% reduction of the targeted gene expression. In some embodiments, the base editing efficiency may result in at least 94% reduction of the targeted gene expression. In some embodiments, the base editing efficiency may result in at least 95% reduction of the targeted gene expression. In some embodiments, the base editing efficiency may result in at least 96% reduction of the targeted gene expression. In some embodiments, the base editing efficiency may result in at least 97% reduction of the targeted gene expression. In some embodiments, the base editing efficiency may result in at least 98% reduction of the targeted gene expression. In some embodiments, the base editing efficiency may result in at least 99% reduction of the targeted gene expression. In some embodiments, the base editing efficiency may result in knockout (100% knockdown of the gene expression) of the gene that is targeted.

[0884] In some embodiments, any of the base editor systems provided herein result in less than 50%, less than 40%, less than 30%, less than 20%, less than 19%, less than 18%, less than 17%, less than 16%, less than 15%, less than 14%, less than 13%, less than 12%, less than 11%, less than 10%, less than 9%, less than 8%, less than 7%, less than 6%, less than 5%, less than 4%, less than 3%, less than 2%, less than 1%, less than 0.9%, less than 0.8%, less than 0.7%, less than 0.6%, less than 0.5%, less than 0.4%, less than 0.3%, less than 0.2%, less than 0.1%, less than 0.09%, less than 0.08%, less than 0.07%, less than 0.06%, less than 0.05%, less than 0.04%, less than 0.03%, less than 0.02%, or less than 0.01% indel formation in the target polynucleotide sequence.

[0885] In some embodiments, targeted modifications, e.g., single base editing, are used simultaneously to target at least 4, 5, 6, 7, 8, 9, 10, 11, 12 13, 14, 15, 16, 17,18, 19, 20, 21, 22,23,24,25,26,27,28,29,30,31,32,33,34,35,36,37,38,39,40,41,42,43,44,45,46, 47, 48, 49 or 50 different endogenous sequences for base editing with different guide RNAs. In some embodiments, targeted modifications, e.g. single base editing, are used to sequentially target at least 4, 5, 6, 7, 8, 9, 10, 11, 12 13, 14, 15, 16, 17,18, 19, 20, 21, 22, 23, 24,25,26,27,28,29,30,31,32,33,34,35,36,37,38,39,40,41,42,43,44,45,46,47,48, 49 50, or more different endogenous gene sequences for base editing with different guide RNAs.

[0886] Some aspects of the disclosure are based on the recognition that any of the base editors provided herein are capable of efficiently generating an intended mutation, such as a point mutation, in a nucleic acid (e.g., a nucleic acid within a genome of a subject) without generating a significant number of unintended mutations, such as unintended point mutations (i.e., mutation of bystanders). In some embodiments, any of the base editors provided herein are capable of generating at least 0.01% of intended mutations (i.e., at least 0.01% base editing efficiency). In some embodiments, any of the base editors provided herein are capable of generating at least 0.01%, 1%, 2%, 3%, 4%, 5%10%, 15%, 20%, 25%, 30%, 40%, 45%, 50%, 60%, 70%, 80%, 90%, 95%, or 99% of intended mutations.

[0887] In some embodiments, any of the base editor systems comprising one of the ABE8 and/or ABE9 base editor variants described herein result in less than 50%, less than 40%, less than 30%, less than 20%, less than 19%, less than 18%, less than 17%, less than 16%, less than 15%, less than 14%, less than 13%, less than 12%, less than 11%, less than 10%, less than 9%, less than 8%, less than 7%, less than 6%, less than 5%, less than 4%, less than 3%, less than 2%, less than 1%, less than 0.9%, less than 0.8%, less than 0.7%, less than 0.6%, less than 0.5%, less than 0.4%, less than 0.3%, less than 0.2%, less than 0.1%, less than 0.09%, less than 0.08%, less than 0.07%, less than 0.06%, less than 0.05%, less than 0.04%, less than 0.03%, less than 0.02%, or less than 0.01% indel formation in the target polynucleotide sequence. In some embodiments, any of the base editor systems comprising one of the ABE8 and/or ABE9 base editor variants described herein result in less than 0.8% indel formation in the target polynucleotide sequence. In some embodiments, any of the base editor systems comprising one of the ABE8 and/or ABE9 base editor variants described herein result in at most 0.8% indel formation in the target polynucleotide sequence. In some embodiments, any of the base editor systems comprising one of the ABE8 and/or ABE9 base editor variants described herein result in less than 0.3% indel formation in the target polynucleotide sequence. In some embodiments, any of the base editor systems comprising one of the ABE8 base editor variants described results in lower indel formation in the target polynucleotide sequence compared to a base editor system comprising one of ABE7 base editors. In some embodiments, any of the base editor systems comprising one of the ABE8 and/or ABE9 base editor variants described herein results in lower indel formation in the target polynucleotide sequence compared to a base editor system comprising an ABE7.10.

[0888] In some embodiments, any of the base editor systems comprising one of the ABE8 and/or ABE9 base editor variants described herein has reduction in indel frequency compared to a base editor system comprising one of the ABE7 base editors. In some embodiments, any of the base editor systems comprising one of the ABE8 and/or ABE9 base editor variants described herein has at least 0.01%, at least 1%, at least 2%, at least 3%, at least 4%, at least 5%, at least 10%, at least 15%, at least 20%, at least 25%, at least 30%, at least 35%, at least 40%, at least 45%, at least 50%, at least 55%, at least 60%, at least 65%, at least 70%, at least 75%, at least 80%, at least 85%, at least 90%, or at least 95% reduction in indel frequency compared to a base editor system comprising one of the ABE7 base editors. In some embodiments, a base editor system comprising one of the ABE8 and/or ABE9 base editor variants described herein has at least 0.01%, at least 1%, at least 2%, at least 3%, at least 4%, at least 5%, at least 10%, at least 15%, at least 20%, at least 25%, at least 30%, at least 35%, at least 40%, at least 45%, at least 50%, at least 55%, at least 60%, at least 65%, at least 70%, at least 75%, at least 80%, at least 85%, at least 90%, or at least 95% reduction in indel frequency compared to a base editor system comprising an ABE7.10.

[0889] The invention provides adenosine deaminase variants (e.g., ABE8 and/or ABE9 variants) that have increased efficiency and specificity. In particular, the adenosine deaminase variants described herein are more likely to edit a desired base within a polynucleotide, and are less likely to edit bases that are not intended to be altered (e.g., “bystanders”).

[0890] In some embodiments, any of the base editing system comprising one of the ABE8 and/or ABE9 base editor variants described herein has reduced bystander editing or mutations. In some embodiments, an unintended editing or mutation is a bystander mutation or bystander editing, for example, base editing of a target base (e.g., A or C) in an unintended or non-target position in a target window of a target nucleotide sequence. In some embodiments, any of the base editing system comprising one of the ABE8 and/or ABE9 base editor variants described herein has reduced bystander editing or mutations compared to a base editor system comprising an ABE7 base editor, e.g., ABE7.10. In some embodiments, any of the base editing system comprising one of the ABE8 and/or ABE9 base editor variants described herein has reduced bystander editing or mutations by at least 1%, at least 2%, at least 3%, at least 4%, at least 5%, at least 10%, at least 15%, at least 20%, at least 25%, at least 30%, at least 35%, at least 40%, at least 45%, at least 50%, at least 55%, at least 60%, at least 65%, at least 70%, at least 75%, at least 80%, at least 85%, at least 90%, at least 95%, or at least 99% compared to a base editor system comprising an ABE7 base editor, e.g., ABE7.10. In some embodiments, any of the base editing system comprising one of the ABE8 and/or ABE9 base editor variants described herein has reduced bystander editing or mutations by at least 1.1 fold, at least 1.2 fold, at least 1.3 fold, at least 1.4 fold, at least 1.5 fold, at least 1.6 fold, at least 1.7 fold, at least 1.8 fold, at least 1.9 fold, at least 2.0 fold, at least 2.1 fold, at least 2.2 fold, at least 2.3 fold, at least 2.4 fold, at least 2.5 fold, at least 2.6 fold, at least 2.7 fold, at least 2.8 fold, at least 2.9 fold, or at least 3.0 fold compared to a base editor system comprising an ABE7 base editor, e.g., ABE7.10.

[0891] In some embodiments, any of the base editing system comprising one of the ABE8 and/or ABE9 base editor variants described herein has reduced spurious editing. In some embodiments, an unintended editing or mutation is a spurious mutation or spurious editing, for example, non-specific editing or guide independent editing of a target base (e.g., A or C) in an unintended or non-target region of the genome. In some embodiments, any of the base editing system comprising one of the ABE8 and/or ABE9 base editor variants described herein has reduced spurious editing compared to a base editor system comprising an ABE7 base editor, e.g., ABE7.10. In some embodiments, any of the base editing system comprising one of the ABE8 and/or ABE9 base editor variants described herein has reduced spurious editing by at least 1%, at least 2%, at least 3%, at least 4%, at least 5%, at least 10%, at least 15%, at least 20%, at least 25%, at least 30%, at least 35%, at least 40%, at least 45%, at least 50%, at least 55%, at least 60%, at least 65%, at least 70%, at least 75%, at least 80%, at least 85%, at least 90%, at least 95%, or at least 99% compared to a base editor system comprising an ABE7 base editor, e.g., ABE7.10. In some embodiments, any of the base editing system comprising one of the ABE8 and/or ABE9 base editor variants described herein has reduced spurious editing by at least 1.1 fold, at least 1.2 fold, at least 1.3 fold, at least 1.4 fold, at least 1.5 fold, at least 1.6 fold, at least 1.7 fold, at least 1.8 fold, at least 1.9 fold, at least 2.0 fold, at least 2.1 fold, at least 2.2 fold, at least 2.3 fold, at least 2.4 fold, at least 2.5 fold, at least 2.6 fold, at least 2.7 fold, at least 2.8 fold, at least 2.9 fold, or at least 3.0 fold compared to a base editor system comprising an ABE7 base editor, e.g., ABE7.10.

[0892] In some embodiments, any of the ABE8 base editor variants described herein have at least 0.01%, at least 1%, at least 2%, at least 3%, at least 4%, at least 5%, at least 10%, at least 15%, at least 20%, at least 25%, at least 30%, at least 35%, at least 40%, at least 45%, at least 50%, at least 55%, at least 60%, at least 65%, at least 70%, at least 75%, at least 80%, at least 85%, at least 90%, at least 95%, or at least 99% base editing efficiency. In some embodiments, the base editing efficiency may be measured by calculating the percentage of edited nucleobases in a population of cells. In some embodiments, any of the ABE8 and/or ABE9 base editor variants described herein have base editing efficiency of at least 0.01%, at least 1%, at least 2%, at least 3%, at least 4%, at least 5%, at least 10%, at least 15%, at least 20%, at least 25%, at least 30%, at least 35%, at least 40%, at least 45%, at least 50%, at least 55%, at least 60%, at least 65%, at least 70%, at least 75%, at least 80%, at least 85%, at least 90%, at least 95%, or at least 99% as measured by edited nucleobases in a population of cells.

[0893] In some embodiments, any of the ABE8 and/or ABE9 base editor variants described herein has higher base editing efficiency compared to the ABE7 base editors. In some embodiments, any of the ABE8 base editor variants described herein have at least 1%, at least 2%, at least 3%, at least 4%, at least 5%, at least 10%, at least 15%, at least 20%, at least 25%, at least 30%, at least 35%, at least 40%, at least 45%, at least 50%, at least 55%, at least 60%, at least 65%, at least 70%, at least 75%, at least 80%, at least 85%, at least 90%, at least 95%, at least 99%, at least 100%, at least 105%, at least 110%, at least 115%, at least 120%, at least 125%, at least 130%, at least 135%, at least 140%, at least 145%, at least 150%, at least 155%, at least 160%, at least 165%, at least 170%, at least 175%, at least 180%, at least 185%, at least 190%, at least 195%, at least 200%, at least 210%, at least 220%, at least 230%, at least 240%, at least 250%, at least 260%, at least 270%, at least 280%, at least 290%, at least 300%, at least 310%, at least 320%, at least 330%, at least 340%, at least 350%, at least 360%, at least 370%, at least 380%, at least 390%, at least 400%, at least 450%, or at least 500% higher base editing efficiency compared to an ABE7 base editor, e.g., ABE7.10.

[0894] In some embodiments, any of the ABE8 and/or ABE9 base editor variants described herein has at least 1.1 fold, at least 1.2 fold, at least 1.3 fold, at least 1.4 fold, at least 1.5 fold, at least 1.6 fold, at least 1.7 fold, at least 1.8 fold, at least 1.9 fold, at least 2.0 fold, at least 2.1 fold, at least 2.2 fold, at least 2.3 fold, at least 2.4 fold, at least 2.5 fold, at least 2.6 fold, at least 2.7 fold, at least 2.8 fold, at least 2.9 fold, at least 3.0 fold, at least 3.1 fold, at least 3.2, at least 3.3 fold, at least 3.4 fold, at least 3.5 fold, at least 3.6 fold, at least 3.7 fold, at least 3.8 fold, at least 3.9 fold, at least 4.0 fold, at least 4.1 fold, at least 4.2 fold, at least 4.3 fold, at least 4.4 fold, at least 4.5 fold, at least 4.6 fold, at least 4.7 fold, at least 4.8 fold, at least 4.9 fold, or at least 5.0 fold higher base editing efficiency compared to an ABE7 base editor, e.g., ABE7.10.

[0895] In some embodiments, any of the ABE8 and/or ABE9 base editor variants described herein have at least 0.01%, at least 1%, at least 2%, at least 3%, at least 4%, at least 5%, at least 10%, at least 15%, at least 20%, at least 25%, at least 30%, at least 35%, at least 40%, at least 45%, at least 50%, at least 55%, at least 60%, at least 65%, at least 70%, at least 75%, at least 80%, at least 85%, at least 90%, at least 95%, or at least 99% on-target base editing efficiency. In some embodiments, any of the ABE8 and/or ABE9 base editor variants described herein have on-target base editing efficiency of at least 0.01%, at least 1%, at least 2%, at least 3%, at least 4%, at least 5%, at least 10%, at least 15%, at least 20%, at least 25%, at least 30%, at least 35%, at least 40%, at least 45%, at least 50%, at least 55%, at least 60%, at least 65%, at least 70%, at least 75%, at least 80%, at least 85%, at least 90%, at least 95%, or at least 99% as measured by edited target nucleobases in a population of cells.

[0896] In some embodiments, any of the ABE8 and/or ABE9 base editor variants described herein has higher on-target base editing efficiency compared to the ABE7 base editors. In some embodiments, any of the ABE8 base editor variants described herein have at least 1%, at least 2%, at least 3%, at least 4%, at least 5%, at least 10%, at least 15%, at least 20%, at least 25%, at least 30%, at least 35%, at least 40%, at least 45%, at least 50%, at least 55%, at least 60%, at least 65%, at least 70%, at least 75%, at least 80%, at least 85%, at least 90%, at least 95%, at least 99%, at least 100%, at least 105%, at least 110%, at least 115%, at least 120%, at least 125%, at least 130%, at least 135%, at least 140%, at least 145%, at least 150%, at least 155%, at least 160%, at least 165%, at least 170%, at least 175%, at least 180%, at least 185%, at least 190%, at least 195%, at least 200%, at least 210%, at least 220%, at least 230%, at least 240%, at least 250%, at least 260%, at least 270%, at least 280%, at least 290%, at least 300%, at least 310%, at least 320%, at least 330%, at least 340%, at least 350%, at least 360%, at least 370%, at least 380%, at least 390%, at least 400%, at least 450%, or at least 500% higher on-target base editing efficiency compared to an ABE7 base editor, e.g., ABE7.10.

[0897] In some embodiments, any of the ABE8 or ABE9 base editor variants described herein has at least 1.1 fold, at least 1.2 fold, at least 1.3 fold, at least 1.4 fold, at least 1.5 fold, at least 1.6 fold, at least 1.7 fold, at least 1.8 fold, at least 1.9 fold, at least 2.0 fold, at least 2.1 fold, at least 2.2 fold, at least 2.3 fold, at least 2.4 fold, at least 2.5 fold, at least 2.6 fold, at least 2.7 fold, at least 2.8 fold, at least 2.9 fold, at least 3.0 fold, at least 3.1 fold, at least 3.2 fold, at least 3.3 fold, at least 3.4 fold, at least 3.5 fold, at least 3.6 fold, at least 3.7 fold, at least 3.8 fold, at least 3.9 fold, at least 4.0 fold, at least 4.1 fold, at least 4.2 fold, at least 4.3 fold, at least 4.4 fold, at least 4.5 fold, at least 4.6 fold, at least 4.7 fold, at least 4.8 fold, at least 4.9 fold, or at least 5.0 fold higher on-target base editing efficiency compared to an ABE7 base editor, e.g., ABE7.10.

[0898] The ABE8 and/or ABE9 base editor variants described herein may be delivered to a host cell via a plasmid, a vector, a LNP complex, or an mRNA. In some embodiments, any of the ABE8 or ABE9 base editor variants described herein is delivered to a host cell as an mRNA. In some embodiments, an ABE8 or ABE9 base editor delivered via a nucleic acid based delivery system, e.g., an mRNA, has on-target editing efficiency of at least at least 1%, at least 2%, at least 3%, at least 4%, at least 5%, at least 10%, at least 15%, at least 20%, at least 25%, at least 30%, at least 35%, at least 40%, at least 45%, at least 50%, at least 55%, at least 60%, at least 65%, at least 70%, at least 75%, at least 80%, at least 85%, at least 90%, at least 95%, or at least 99% as measured by edited nucleobases. In some embodiments, an ABE8 or ABE9 base editor delivered by an mRNA system has higher base editing efficiency compared to an ABE8 or ABE9 base editor delivered by a plasmid or vector system. In some embodiments, any of the ABE8 or ABE9 base editor variants described herein has at least 1%, at least 2%, at least 3%, at least 4%, at least 5%, at least 10%, at least 15%, at least 20%, at least 25%, at least 30%, at least 35%, at least 40%, at least 45%, at least 50%, at least 55%, at least 60%, at least 65%, at least 70%, at least 75%, at least 80%, at least 85%, at least 90%, at least 95%, at least 99%, at least 100%, at least 105%, at least 110%, at least 115%, at least 120%, at least 125%, at least 130%, at least 135%, at least 140%, at least 145%, at least 150%, at least 155%, at least 160%, at least 165%, at least 170%, at least 175%, at least 180%, at least 185%, at least 190%, at least 195%, at least 200%, at least 210%, at least 220%, at least 230%, at least 240%, at least 250%, at least 260%, at least 270%, at least 280%, at least 290%, at least 300% higher, at least 310%, at least 320%, at least 330%, at least 340%, at least 350%, at least 360%, at least 370%, at least 380%, at least 390%, at least 400%, at least 450%, or at least 500% on-target editing efficiency when delivered by an mRNA system compared to when delivered by a plasmid or vector system. In some embodiments, any of the ABE8 or ABE9 base editor variants described herein has at least 1.1 fold, at least 1.2 fold, at least 1.3 fold, at least 1.4 fold, at least 1.5 fold, at least 1.6 fold, at least 1.7 fold, at least 1.8 fold, at least 1.9 fold, at least 2.0 fold, at least 2.1 fold, at least 2.2 fold, at least 2.3 fold, at least 2.4 fold, at least 2.5 fold, at least 2.6 fold, at least 2.7 fold, at least 2.8 fold, at least 2.9 fold, at least 3.0 fold, at least 3.1 fold, at least 3.2 fold, at least 3.3 fold, at least 3.4 fold, at least 3.5 fold, at least 3.6 fold, at least 3.7 fold, at least 3.8 fold, at least 3.9 fold, at least 4.0 fold, at least 4.1 fold, at least 4.2 fold, at least 4.3 fold, at least 4.4 fold, at least 4.5 fold, at least 4.6 fold, at least 4.7 fold, at least 4.8 fold, at least 4.9 fold, or at least 5.0 fold higher on-target editing efficiency when delivered by an mRNA system compared to when delivered by a plasmid or vector system.

[0899] In some embodiments, any of the base editor systems comprising one of the ABE8 or ABE9 base editor variants described herein result in less than 50%, less than 40%, less than 30%, less than 20%, less than 19%, less than 18%, less than 17%, less than 16%, less than 15%, less than 14%, less than 13%, less than 12%, less than 11%, less than 10%, less than 9%, less than 8%, less than 7%, less than 6%, less than 5%, less than 4%, less than 3%, less than 2%, less than 1%, less than 0.9%, less than 0.8%, less than 0.7%, less than 0.6%, less than 0.5%, less than 0.4%, less than 0.3%, less than 0.2%, less than 0.1%, less than 0.09%, less than 0.08%, less than 0.07%, less than 0.06%, less than 0.05%, less than 0.04%, less than 0.03%, less than 0.02%, or less than 0.01% off-target editing in the target polynucleotide sequence.

[0900] In some embodiments, any of the ABE8 or ABE9 base editor variants described herein has lower guided off-target editing efficiency when delivered by an mRNA system compared to when delivered by a plasmid or vector system. In some embodiments, any of the ABE8 or ABE9 base editor variants described herein has at least 1%, at least 2%, at least 3%, at least 4%, at least 5%, at least 10%, at least 15%, at least 20%, at least 25%, at least 30%, at least 35%, at least 40%, at least 45%, at least 50%, at least 55%, at least 60%, at least 65%, at least 70%, at least 75%, at least 80%, at least 85%, at least 90%, at least 95%, or at least 99% lower guided off-target editing efficiency when delivered by an mRNA system compared to when delivered by a plasmid or vector system. In some embodiments, any of the ABE8 or ABE9 base editor variants described herein has at least 1.1 fold, at least 1.2 fold, at least 1.3 fold, at least 1.4 fold, at least 1.5 fold, at least 1.6 fold, at least 1.7 fold, at least 1.8 fold, at least 1.9 fold, at least 2.0 fold, at least 2.1 fold, at least 2.2 fold, at least 2.3 fold, at least 2.4 fold, at least 2.5 fold, at least 2.6 fold, at least 2.7 fold, at least 2.8 fold, at least 2.9 fold, or at least 3.0 fold lower guided off-target editing efficiency when delivered by an mRNA system compared to when delivered by a plasmid or vector system. In some embodiments, any of the ABE8 or ABE9 base editor variants described herein has at least about 2.2 fold decrease in guided off-target editing efficiency when delivered by an mRNA system compared to when delivered by a plasmid or vector system.

[0901] In some embodiments, any of the ABE8 or ABE9 base editor variants described herein has lower guide-independent off-target editing efficiency when delivered by an mRNA system compared to when delivered by a plasmid or vector system. In some embodiments, any of the ABE8 or ABE9 base editor variants described herein has at least 1%, at least 2%, at least 3%, at least 4%, at least 5%, at least 10%, at least 15%, at least 20%, at least 25%, at least 30%, at least 35%, at least 40%, at least 45%, at least 50%, at least 55%, at least 60%, at least 65%, at least 70%, at least 75%, at least 80%, at least 85%, at least 90%, at least 95%, or at least 99% lower guide-independent off-target editing efficiency when delivered by an mRNA system compared to when delivered by a plasmid or vector system. In some embodiments, any of the ABE8 or ABE9 base editor variants described herein has at least 1.1 fold, at least 1.2 fold, at least 1.3 fold, at least 1.4 fold, at least 1.5 fold, at least 1.6 fold, at least 1.7 fold, at least 1.8 fold, at least 1.9 fold, at least 2.0 fold, at least 2.1 fold, at least 2.2 fold, at least 2.3 fold, at least 2.4 fold, at least 2.5 fold, at least 2.6 fold, at least 2.7 fold, at least 2.8 fold, at least 2.9 fold, at least 3.0 fold, at least 5.0 fold, at least 10.0 fold, at least 20.0 fold, at least 50.0 fold, at least 70.0 fold, at least 100.0 fold, at least 120.0 fold, at least 130.0 fold, or at least 150.0 fold lower guide-independent off-target editing efficiency when delivered by an mRNA system compared to when delivered by a plasmid or vector system. In some embodiments, ABE8 or ABE9 base editor variants described herein has 134.0 fold decrease in guide-independent off-target editing efficiency (e.g., spurious RNA deamination) when delivered by an mRNA system compared to when delivered by a plasmid or vector system. In some embodiments, ABE8 or ABE9 base editor variants described herein does not increase guide-independent mutation rates across the genome.

[0902] In some embodiments, a single gene delivery event (e.g., by transduction, transfection, electroporation or any other method) can be used to target base editing of 5 sequences within a cell's genome. In some embodiments, a single gene delivery event can be used to target base editing of 6 sequences within a cell's genome. In some embodiments, a single gene delivery event can be used to target base editing of 7 sequences within a cell's genome. In some embodiments, a single electroporation event can be used to target base editing of 8 sequences within a cell's genome. In some embodiments, a single gene delivery event can be used to target base editing of 9 sequences within a cell's genome. In some embodiments, a single gene delivery event can be used to target base editing of 10 sequences within a cell's genome. In some embodiments, a single gene delivery event can be used to target base editing of 20 sequences within a cell's genome. In some embodiments, a single gene delivery event can be used to target base editing of 30 sequences within a cell's genome. In some embodiments, a single gene delivery event can be used to target base editing of 40 sequences within a cell's genome. In some embodiments, a single gene delivery event can be used to target base editing of 50 sequences within a cell's genome.

[0903] In some embodiments, the method described herein, for example, the base editing methods has minimum to no off-target effects.

[0904] In some embodiments, the base editing method described herein results in at least 50% of a cell population that have been successfully edited (i.e., cells that have been successfully engineered). In some embodiments, the base editing method described herein results in at least 55% of a cell population that have been successfully edited. In some embodiments, the base editing method described herein results in at least 60% of a cell population that have been successfully edited. In some embodiments, the base editing method described herein results in at least 65% of a cell population that have been successfully edited. In some embodiments, the base editing method described herein results in at least 70% of a cell population that have been successfully edited. In some embodiments, the base editing method described herein results in at least 75% of a cell population that have been successfully edited. In some embodiments, the base editing method described herein results in at least 80% of a cell population that have been successfully edited. In some embodiments, the base editing method described herein results in at least 85% of a cell population that have been successfully edited. In some embodiments, the base editing method described herein results in at least 90% of a cell population that have been successfully edited. In some embodiments, the base editing method described herein results in at least 95% of a cell population that have been successfully edited. In some embodiments, the base editing method described herein results in about 91%, 92%, 93%, 94%, 95%, 96%, 97%, 98%, 99% or 100% of a cell population that have been successfully edited.

[0905] In some embodiments, the live cell recovery following a base editing intervention is greater than at least 60%, 70%, 80%, 90% of the starting cell population at the time of the base editing event. In some embodiments, the live cell recovery as described above is about 70%. In some embodiments, the live cell recovery as described above is about 75%. In some embodiments, the live cell recovery as described above is about 80%. In some embodiments, the live cell recovery as described above is about 85%. In some embodiments, the live cell recovery as described above is about 90%, or about 91%, 92%, 93%, 94% 95%, 96%, 97%, 98%, or 99%, or 100% of the cells in the population at the time of the base editing event.

[0906] In some embodiments the engineered cell population can be further expanded in vitro by about 2 fold, about 3-fold, about 4-fold, about 5-fold, about 6-fold, about 7-fold, about 8-fold, about 9-fold, about 10-fold, about 15-fold, about 20-fold, about 25-fold, about 30-fold, about 35-fold, about 40-fold, about 45-fold, about 50-fold, or about 100-fold.

[0907] The number of intended mutations and indels can be determined using any suitable method, for example, as described in International PCT Application Nos. PCT/2017/045381 (WO2018/027078) and PCT/US2016/058344 (WO2017/070632); Komor, A. C., et al., “Programmable editing of a target base in genomic DNA without double-stranded DNA cleavage” Nature 533, 420-424 (2016); Gaudelli, N. M., et al., “Programmable base editing of A·T to G·C in genomic DNA without DNA cleavage” Nature 551, 464-471 (2017); and Komor, A. C., et al., “Improved base excision repair inhibition and bacteriophage Mu Gam protein yields C:G-to-T:A base editors with higher efficiency and product purity” Science Advances 3:eaao4774 (2017); the entire contents of which are hereby incorporated by reference.

[0908] In some embodiments, to calculate indel frequencies, sequencing reads are scanned for exact matches to two 10-bp sequences that flank both sides of a window in which indels can occur. If no exact matches are located, the read is excluded from analysis. If the length of this indel window exactly matches the reference sequence the read is classified as not containing an indel. If the indel window is two or more bases longer or shorter than the reference sequence, then the sequencing read is classified as an insertion or deletion, respectively. In some embodiments, the base editors provided herein can limit formation of indels in a region of a nucleic acid. In some embodiments, the region is at a nucleotide targeted by a base editor or a region within 2, 3, 4, 5, 6, 7, 8, 9, or 10 nucleotides of a nucleotide targeted by a base editor.

[0909] The number of indels formed at a target nucleotide region can depend on the amount of time a nucleic acid (e.g., a nucleic acid within the genome of a cell) is exposed to a base editor. In some embodiments, the number or proportion of indels is determined after at least 1 hour, at least 2 hours, at least 6 hours, at least 12 hours, at least 24 hours, at least 36 hours, at least 48 hours, at least 3 days, at least 4 days, at least 5 days, at least 7 days, at least 10 days, or at least 14 days of exposing the target nucleotide sequence (e.g., a nucleic acid within the genome of a cell) to a base editor. It should be appreciated that the characteristics of the base editors as described herein can be applied to any of the fusion proteins, or methods of using the fusion proteins provided herein.

[0910] Details of base editor efficiency are described in International PCT Application Nos. PCT/2017/045381 (WO 2018/027078) and PCT/US2016/058344 (WO 2017/070632), each of which is incorporated herein by reference for its entirety. Also see Komor, A. C., et al., “Programmable editing of a target base in genomic DNA without double-stranded DNA cleavage” Nature 533, 420-424 (2016); Gaudelli, N. M., et al., “Programmable base editing of A·T to G·C in genomic DNA without DNA cleavage” Nature 551, 464-471 (2017); and Komor, A. C., et al., “Improved base excision repair inhibition and bacteriophage Mu Gam protein yields C:G-to-T:A base editors with higher efficiency and product purity” Science Advances 3:eaao4774 (2017), the entire contents of which are hereby incorporated by reference. In some embodiments, editing of a plurality of nucleobase pairs in one or more genes using the methods provided herein results in formation of at least one intended mutation. In some embodiments, said formation of said at least one intended mutation results in the disruption the normal function of a gene. In some embodiments, said formation of said at least one intended mutation results decreases or eliminates the expression of a protein encoded by a gene. It should be appreciated that multiplex editing can be accomplished using any method or combination of methods provided herein.

### Multiplex Editing

[0911] In some embodiments, the base editor system provided herein is capable of multiplex editing of a plurality of nucleobase pairs in one or more genes. In some embodiments, the plurality of nucleobase pairs is located in the same gene or in one or more genes or polynucleotide sequences, wherein at least one gene is located in a different locus. In some embodiments, the base editor system provided herein is capable of multiplex editing of a plurality of nucleobase pairs in one or more genes involved in hypoxic and/or adenosinergic pathways or regulatory components thereof. In some embodiments, the base editor system provided herein is capable of multiplex editing of a plurality of nucleobase pairs in one or more genes selected from A2AR, A2BR, HIF1α, and/or HIF1α.I3.

[0912] In some embodiments, the multiplex editing can comprise one or more guide polynucleotides. In some embodiments, the multiplex editing can comprise one or more base editor systems. In some embodiments, the multiplex editing can comprise one or more base editor systems with a single guide polynucleotide or a plurality of guide polynucleotides. In some embodiments, the multiplex editing can comprise one or more guide polynucleotides with a single base editor system. In some embodiments, the multiplex editing can comprise at least one guide polynucleotide that does or does not require a PAM sequence to target binding to a target polynucleotide sequence. In some embodiments, the multiplex editing can comprise a mix of at least one guide polynucleotide that does not require a PAM sequence to target binding to a target polynucleotide sequence and at least one guide polynucleotide that require a PAM sequence to target binding to a target polynucleotide sequence. It should be appreciated that the characteristics of the multiplex editing using any of the base editors as described herein can be applied to any combination of methods using any base editor provided herein. It should also be appreciated that the multiplex editing using any of the base editors as described herein can comprise a sequential editing of a plurality of nucleobase pairs.

[0913] In some embodiments, the plurality of nucleobase pairs are in one more genes or polynucleotide sequences. In some embodiments, the plurality of nucleobase pairs is in the same gene or polynucleotide sequence. In some embodiments, at least one gene in the one more genes is located in a different locus.

[0914] In some embodiments, the editing is editing of the plurality of nucleobase pairs in at least one protein coding region, in at least one protein non-coding region, or in at least one protein coding region and at least one protein non-coding region.

[0915] In some embodiments, the editing is in conjunction with one or more guide polynucleotides. In some embodiments, the base editor system can comprise one or more base editor systems. In some embodiments, the base editor system can comprise one or more base editor systems in conjunction with a single guide polynucleotide or a plurality of guide polynucleotides. In some embodiments, the editing is in conjunction with one or more guide polynucleotide with a single base editor system. In some embodiments, the editing is in conjunction with at least one guide polynucleotide that does not require a PAM sequence to target binding to a target polynucleotide sequence or with at least one guide polynucleotide that requires a PAM sequence to target binding to a target polynucleotide sequence, or with a mix of at least one guide polynucleotide that does not require a PAM sequence to target binding to a target polynucleotide sequence and at least one guide polynucleotide that does require a PAM sequence to target binding to a target polynucleotide sequence. It should be appreciated that the characteristics of the multiplex editing using any of the base editors as described herein can be applied to any of combination of the methods of using any of the base editors provided herein. It should also be appreciated that the editing can comprise a sequential editing of a plurality of nucleobase pairs.

[0916] In some embodiments, the base editor system capable of multiplex editing of a plurality of nucleobase pairs in one or more genes comprises one of ABE7, ABE8, and/or ABE9 base editors. In some embodiments, the base editor system capable of multiplex editing comprising one of the ABE8 base editor variants described herein has higher multiplex editing efficiency compared to the base editor system capable of multiplex editing comprising one of ABE7 base editors. In some embodiments, the base editor system capable of multiplex editing comprising one of the ABE8 base editor variants described herein has at least 1%, at least 2%, at least 3%, at least 4%, at least 5%, at least 10%, at least 15%, at least 20%, at least 25%, at least 30%, at least 35%, at least 40%, at least 45%, at least 50%, at least 55%, at least 60%, at least 65%, at least 70%, at least 75%, at least 80%, at least 85%, at least 90%, at least 95%, at least 99%, at least 100%, at least 105%, at least 110%, at least 115%, at least 120%, at least 125%, at least 130%, at least 135%, at least 140%, at least 145%, at least 150%, at least 155%, at least 160%, at least 165%, at least 170%, at least 175%, at least 180%, at least 185%, at least 190%, at least 195%, at least 200%, at least 210%, at least 220%, at least 230%, at least 240%, at least 250%, at least 260%, at least 270%, at least 280%, at least 290%, at least 300% higher, at least 310%, at least 320%, at least 330%, at least 340%, at least 350%, at least 360%, at least 370%, at least 380%, at least 390%, at least 400%, at least 450%, or at least 500% higher multiplex editing efficiency compared the base editor system capable of multiplex editing comprising one of ABE7 base editors. In some embodiments, the base editor system capable of multiplex editing comprising one of the ABE8 and/or ABE9 base editor variants described herein has at least 1.1 fold, at least 1.2 fold, at least 1.3 fold, at least 1.4 fold, at least 1.5 fold, at least 1.6 fold, at least 1.7 fold, at least 1.8 fold, at least 1.9 fold, at least 2.0 fold, at least 2.1 fold, at least 2.2 fold, at least 2.3 fold, at least 2.4 fold, at least 2.5 fold, at least 2.6 fold, at least 2.7 fold, at least 2.8 fold, at least 2.9 fold, at least 3.0 fold, at least 3.1 fold, at least 3.2 fold, at least 3.3 fold, at least 3.4 fold, at least 3.5 fold, at least 4.0 fold, at least 4.5 fold, at least 5.0 fold, at least 5.5 fold, or at least 6.0 fold higher multiplex editing efficiency compared the base editor system capable of multiplex editing comprising one of ABE7 base editors.

### Expression of Polypeptides in a Host Cell

[0917] Polypeptides of the invention may be expressed in virtually any host cell of interest, including mammalian cells (e.g., human cells), using routine methods known to the skilled artisan. In some embodiments, the host cell of interest is a human cell. In some embodiments, the host cell is an immune cell (e.g., T- or NK-cell). In some embodiments, the host cell is a CAR-T cell.

[0918] For example, a DNA encoding a polypeptide of the invention can be cloned by designing suitable primers for the upstream and downstream of CDS based on the cDNA sequence The cloned DNA may be directly, or after digestion with a restriction enzyme when desired, or after addition of a suitable linker and/or a nuclear localization signal, ligated with a DNA encoding one or more additional components of a base editing system. The base editing system is translated in a host cell to form a complex.

[0919] A DNA encoding a protein domain described herein can be obtained by chemically synthesizing the DNA, or by connecting synthesized partly overlapping oligoDNA short chains by utilizing the PCR method and the Gibson Assembly method to construct a DNA encoding the full length thereof. The advantage of constructing a full-length DNA by chemical synthesis or a combination of PCR method or Gibson Assembly method is that the codon to be used can be designed in CDS full-length according to the host into which the DNA is introduced. In the expression of a heterologous DNA, the protein expression level is expected to increase by converting the DNA sequence thereof to a codon highly frequently used in the host organism. As the data of codon use frequency in host to be used, for example, the genetic code use frequency database (kazusa.or.jp/codon/index.html) disclosed in the home page of Kazusa DNA Research Institute can be used, or documents showing the codon use frequency in each host may be referred to. By reference to the obtained data and the DNA sequence to be introduced, codons showing low use frequency in the host from among those used for the DNA sequence may be converted to a codon coding the same amino acid and showing high use frequency.

[0920] An expression vector containing a DNA encoding a nucleic acid sequence-recognizing module and/or a nucleic acid base converting enzyme can be produced, for example, by linking the DNA to the downstream of a promoter in a suitable expression vector.

[0921] As the expression vector, animal cell expression plasmids and animal virus vectors such as retrovirus, vaccinia virus, adenovirus and the like, and the like are used.

[0922] Regarding the promoter to be used, any promoter appropriate for a host to be used for gene expression can be used. In a conventional method using double-stranded breaks, since the survival rate of the host cell sometimes decreases markedly due to the toxicity, it is desirable to increase the number of cells by the start of the induction by using an inductive promoter. However, since sufficient cell proliferation can also be afforded by expressing the nucleic acid-modifying enzyme complex of the present invention, a constitutive promoter can be used without limitation.

[0923] For example, when the host is an animal cell, an SR.alpha. promoter, SV40 promoter, LTR promoter, cytomegalovirus (CMV) promoter, MND promoter, Rous sarcoma virus (RSV) promoter, Moloney mouse leukemia virus (MoMuLV), LTR, herpes simplex virus thymidine kinase (HSV-TK) promoter, and the like can be used. Of these, CMV promoter, SR.alpha. promoter and the like are preferable.

[0924] Expression vectors for use in the present invention, besides those mentioned above, can comprise an enhancer, a splicing signal, a terminator, a polyA addition signal, a selection marker, such as drug resistance gene, an auxotrophic complementary gene and the like, a replication origin, and the like can be used.

[0925] An RNA encoding a protein domain described herein can be prepared by, for example, in vitro transcription of a nucleic acid sequence encoding any of the polypeptides disclosed herein.

[0926] A polypeptide of the invention can be intracellularly expressed by introducing into the cell an expression vector comprising a nucleic acid sequence encoding the polypeptide.

[0927] Animal cells contemplated in the present invention include, but are not limited to, cell lines such as monkey COS-7 cells, monkey Vero cells, Chinese hamster ovary (CHO) cells, dhfr gene-deficient CHO cells, mouse L cells, mouse AtT-20 cells, mouse myeloma cells, rat GH3 cells, human FL cells and the like, pluripotent stem cells such as iPS cells, ES cells derived humans and other mammals, and primary cultured cells prepared from various tissues. Furthermore, zebrafish embryo, Xenopus oocyte, and the like can also be used.

[0928] All the above-mentioned host cells may be haploid (monoploid), or polyploid (e.g., diploid, triploid, tetraploid, etc.). Using conventional methods, mutations, in principle, introduced into only one homologous chromosome produce a heterogenous cell. Therefore, the desired phenotype is not expressed unless the mutation is dominant. For recessive mutations, acquiring a homozygous cell can be inconvenient due to labor and time requirements. In contrast, according to the present invention, since a mutation can be introduced into any allele on the homologous chromosome in the genome, the desired phenotype can be expressed in a single generation even in the case of recessive mutation, thereby solving the problem associated with conventional mutagenesis methods.

[0929] An expression vector can be introduced by a known method (e.g., the lysozyme method, the competent method, the PEG method, the CaCl₂) coprecipitation method, electroporation, microinjection, particle gun method, lipofection, Agrobacterium-mediated delivery, etc.) according to the kind of the host.

[0930] A vector can be introduced into an animal cell according to the methods described in, for example, Cell Engineering additional volume 8, New Cell Engineering Experiment Protocol, 263-267 (1995) (published by Shujunsha), and Virology, 52, 456 (1973).

[0931] As a medium for culturing an animal cell, for example, minimum essential medium (MEM) containing about 5 to about 20% of fetal bovine serum (Science, 122, 501 (1952)), Dulbecco's modified Eagle medium (DMEM) (Virology, 8, 396 (1959)], RPMI 1640 medium (The Journal of the American Medical Association, 199, 519 (1967)], 199 medium (Proceeding of the Society for the Biological Medicine, 73, 1 (1950)] and the like are used. The pH of the medium is preferably about 6 to about 8. The culture is performed at generally about 30° C. to about 40° C. Where necessary, aeration and stirring may be performed.

[0932] When a higher eukaryotic cell, such as animal cell is used as a host cell, a DNA encoding a base editing system of the present invention is introduced into a host cell under the regulation of an inducible promoter (e.g., metallothionein promoter (induced by heavy metal ion), heat shock protein promoter (induced by heat shock), Tet-ON/Tet-OFF system promoter (induced by addition or removal of tetracycline or a derivative thereof), steroid-responsive promoter (induced by steroid hormone or a derivative thereof) etc.), the induction substance is added to the medium (or removed from the medium) at an appropriate stage to induce expression of the nucleic acid-modifying enzyme complex, culture is performed for a given period to carry out a base editing and, introduction of a mutation into a target gene, transient expression of the base editing system can be realized.

[0933] Alternatively, the above-mentioned inductive promoter can also be utilized as a vector removal mechanism when higher eukaryotic cells, such as animal cells, and the like are used as a host cell. That is, a vector is mounted with a replication origin that functions in a host cell, and a nucleic acid encoding a protein necessary for replication (e.g., SV40 on and large T antigen, oriP and EBNA-1 etc. for animal cells), of the expression of the nucleic acid encoding the protein is regulated by the above-mentioned inducible promoter. As a result, while the vector is autonomously replicable in the presence of an induction substance, when the induction substance is removed, autonomous replication is not available, and the vector naturally falls off along with cell division (autonomous replication is not possible by the addition of tetracycline and doxycycline in Tet-OFF system vector).

### Delivery System

[0934] The suitability of nucleobase editors to target one or more nucleotides in a polynucleotide sequence (e.g., aA2AR, A2BR, HIF1α, HIF1α.I3 gene) is evaluated as described herein. In one embodiment, a single cell of interest is transfected, transduced, or otherwise modified with a nucleic acid molecule or molecules encoding a base editing system described herein together with a small amount of a vector encoding a reporter (e.g., GFP). These cells can be any cell line known in the art, including immune cells (e.g., T- or NK-cells), or immortalized human cell lines, such as 293T, K562 or U20S. Alternatively, primary cells (e.g., human immune cells) may be used. Cells may also be obtained from a subject or individual, such as from tissue biopsy, surgery, blood, plasma, serum, or other biological fluid. Such cells may be relevant to the eventual cell target.

[0935] Delivery may be performed using a viral vector. In one embodiment, transfection may be performed using lipid transfection (such as Lipofectamine or Fugene) or by electroporation. Following transfection, expression of a reporter (e.g., GFP) can be determined either by fluorescence microscopy or by flow cytometry to confirm consistent and high levels of transfection. These preliminary transfections can comprise different nucleobase editors to determine which combinations of editors give the greatest activity. The system can comprise one or more different vectors. In one embodiment, the base editor is codon optimized for expression of the desired cell type, preferentially a eukaryotic cell, preferably a mammalian cell or a human cell.

[0936] The activity of the nucleobase editor is assessed as described herein, i.e., by sequencing the genome of the cells to detect alterations in a target sequence. For Sanger sequencing, purified PCR amplicons are cloned into a plasmid backbone, transformed, miniprepped and sequenced with a single primer. Sequencing may also be performed using next generation sequencing (NGS) techniques. When using next generation sequencing, amplicons may be 300-500 bp with the intended cut site placed asymmetrically. Following PCR, next generation sequencing adapters and barcodes (for example Illumina multiplex adapters and indexes) may be added to the ends of the amplicon, e.g., for use in high throughput sequencing (for example on an Illumina MiSeq). The fusion proteins that induce the greatest levels of target specific alterations in initial tests can be selected for further evaluation.

[0937] In particular embodiments, the nucleobase editors are used to target polynucleotides of interest. In one embodiment, a nucleobase editor of the invention is delivered to cells (e.g., immune cells (e.g., T- or NK-cells)) in conjunction with one or more guide RNAs that are used to target one or more nucleic acid sequences of interest within the genome of a cell, thereby altering the target gene(s) (e.g., A2AR, A2BR, HIF1α, HIF1α.I3). In some embodiments, a base editor is targeted by one or more guide RNAs to introduce one or more edits to the sequence of one or more genes of interest (e.g., A2AR, A2BR, HIF1α, HIF1α.I3).

[0938] In some embodiments, the one or more edits to the sequence of one or more genes of interest decrease or eliminate expression of the protein encoded by the gene in the host cell (e.g., immune cells (e.g., T- or NK-cells)). In some embodiments, expression of one or more proteins encoded by one or more genes of interest (e.g., A2AR, A2BR, HIF1α, HIF1α.I3) is completely knocked out or eliminated in the host cell (e.g., immune cells (e.g., T- or NK-cells)). In some embodiments, the one or more genes of interest are selected from A2AR, A2BR, HIF1α, and/or HIF1α.I3.

[0939] In some embodiments, the host cell is selected from a bacterial cell, plant cell, insect cell, human cell, or mammalian cell. In some embodiments, the host cell is a mammalian cell. In some embodiments, the host cell is a human cell. In some embodiments, the cell is in vitro. In some embodiments, the cell is in vivo.

### Nucleic Acid-Based Delivery of Base Editor Systems

[0940] Nucleic acid molecules encoding a base editor system according to the present disclosure can be administered to subjects or delivered into cells in vitro or in vivo by art-known methods or as described herein. For example, a base editor system comprising a deaminase (e.g., cytidine or adenine deaminase) can be delivered by vectors (e.g., viral or non-viral vectors), or by naked DNA, DNA complexes, lipid nanoparticles, or a combination of the aforementioned compositions.

[0941] Nucleic acids encoding cytidine or adenosine base editors can be delivered directly to cells (e.g., immune cells) as naked DNA or RNA, for instance by means of transfection or electroporation, or can be conjugated to molecules (e.g., N-acetylgalactosamine) promoting uptake by the target cells. Nucleic acid vectors, such as the vectors described herein can also be used. In particular embodiments, a polynucleotide, e.g. a mRNA encoding a base editor or a functional component thereof may be co-electroporated with a combination of multiple guide RNAs as described herein.

[0942] Nanoparticles, which can be organic or inorganic, are useful for delivering a base editor system or component thereof. Nanoparticles are well known in the art and any suitable nanoparticle can be used to deliver a base editor system or component thereof, or a nucleic acid molecule encoding such components. In one example, organic (e.g. lipid and/or polymer) nanoparticles are suitable for use as delivery vehicles in certain embodiments of this disclosure. Exemplary lipids for use in nanoparticle formulations, and/or gene transfer are shown in Table 17 (below).

TABLE 17
Lipids used for gene transfer.

| Lipid | Abbreviation | Feature |
|---|---|---|
| 1,2-Dioleoyl-sn-glycero-3-phosphatidylcholine | DOPC | Helper |
| 1,2-Dioleoyl-sn-glycero-3-phosphatidylethanolamine | DOPE | Helper |
| Cholesterol | | Helper |
| N-[1-(2,3-Dioleyloxy)prophyl]N,N,N-trimethylammonium | DOTMA | Cationic |
| chloride | | |
| 1,2-Dioleoyloxy-3-trimethylammonium-propane | DOTAP | Cationic |
| Dioctadecylamidoglycylspermine | DOGS | Cationic |
| N-(3-Aminopropyl)-N,N-dimethyl-2,3-bis(dodecyloxy)-1- | GAP-DLRIE | Cationic |
| propanaminium bromide | | |
| Cetyltrimethylammonium bromide | CTAB | Cationic |
| 6-Lauroxyhexyl ornithinate | LHON | Cationic |
| 1-(2,3-Dioleoyloxypropyl)-2,4,6-trimethylpyridinium | 2Oc | Cationic |
| 2,3-Dioleyloxy-N-[2(sperminecarboxamido-ethyl]-N,N- | DOSPA | Cationic |
| dimethyl-1-propanaminium trifluoroacetate | | |
| 1,2-Dioleyl-3-trimethylammonium-propane | DOPA | Cationic |
| N-(2-Hydroxyethyl)-N,N-dimethyl-2,3-bis(tetradecyloxy)-1- | MDRIE | Cationic |
| propanaminium bromide | | |
| Dimyristooxypropyl dimethyl hydroxyethyl ammonium bromide | DMRI | Cationic |
| 3β-[N-(N′,N′-Dimethylaminoethane)-carbamoyl]cholesterol | DC-Chol | Cationic |
| Bis-guanidium-tren-cholesterol | BGTC | Cationic |
| 1,3-Diodeoxy-2-(6-carboxy-spermyl)-propylamide | DOSPER | Cationic |
| Dimethyloctadecylammonium bromide | DDAB | Cationic |
| Dioctadecylamidoglicylspermidin | DSL | Cationic |
| rac-[(2,3-Dioctadecyloxypropyl)(2-hydroxyethyl)]- | CLIP-1 | Cationic |
| dimethylammonium chloride | | |
| rac-[2(2,3-Dihexadecyloxypropyl- | CLIP-6 | Cationic |
| oxymethyloxy)ethyl]trimethylammoniun bromide | | |
| Ethyldimyristoylphosphatidylcholine | EDMPC | Cationic |
| 1,2-Distearyloxy-N,N-dimethyl-3-aminopropane | DSDMA | Cationic |
| 1,2-Dimyristoyl-trimethylammonium propane | DMTAP | Cationic |
| O,O′-Dimyristyl-N-lysyl aspartate | DMKE | Cationic |
| 1,2-Distearoyl-sn-glycero-3-ethylpho sphocholine | DSEPC | Cationic |
| N-Palmitoyl D-erythro-sphingosyl carbamoyl-spermine | CCS | Cationic |
| N-t-Butyl-N0-tetradecyl-3-tetradecylaminopropionamidine | diC14-amidine | Cationic |
| Octadecenolyoxy[ethyl-2-heptadecenyl-3 hydroxyethyl] | DOTIM | Cationic |
| imidazolinium chloride | | |
| N1-Cholesteryloxycarbonyl-3,7-diazanonane-1,9-diamine | CDAN | Cationic |
| 2-(3-[Bis(3-amino-propyl)-amino]propylamino)-N- | RPR209120 | Cationic |
| ditetradecylcarbamoylme-ethyl-acetamide | | |
| 1,2-dilinoleyloxy-3-dimethylaminopropane | DLinDMA | Cationic |
| 2,2-dilinoleyl-4-dimethylaminoethyl-[1,3]-dioxolane | DLin-KC2- | Cationic |
| | DMA | |
| dilinoleyl-methyl-4-dimethylaminobutyrate | DLin-MC3- | Cationic |
| | DMA | |

[0943] Table 18 lists exemplary polymers for use in gene transfer and/or nanoparticle formulations.

TABLE 18
Polymers used for gene transfer.

| Polymer | Abbreviation |
|---|---|
| Poly(ethylene)glycol | PEG |
| Polyethylenimine | PEI |
| Dithiobis (succinimidylpropionate) | DSP |
| Dimethyl-3,3′-dithiobispropionimidate | DTBP |
| Poly(ethylene imine)biscarbamate | PEIC |
| Poly(L-lysine) | PLL |
| Histidine modified PLL | |
| Poly(N-vinylpyrrolidone) | PVP |
| Poly(propylenimine) | PPI |
| Poly(amidoamine) | PAMAM |
| Poly(amidoethylenimine) | SS-PAEI |
| Triethylenetetramine | TETA |
| Poly(β-aminoester) | |
| Poly(4-hydroxy-L-proline ester) | PHP |
| Poly(allylamine) | |
| Poly(α-[4-aminobutyl]-L-glycolic acid) | PAGA |
| Poly(D,L-lactic-co-glycolic acid) | PLGA |
| Poly(N-ethyl-4-vinylpyridinium bromide) | |
| Poly(phosphazene)s | PPZ |
| Poly(phosphoester)s | PPE |
| Poly(phosphoramidate)s | PPA |
| Poly(N-2-hydroxypropylmethacrylamide) | pHPMA |
| Poly (2-(dimethylamino)ethyl methacrylate) | pDMAEMA |
| Poly(2-aminoethyl propylene phosphate) | PPE-EA |
| Chitosan | |
| Galactosylated chitosan | |
| N-Dodacylated chitosan | |
| Histone | |
| Collagen | |
| Dextran-spermine | D-SPM |

[0944] Table 19 summarizes delivery methods for a polynucleotide encoding a fusion protein described herein.

TABLE 19
Delivery methods.

| | | Delivery into | | | Type of |
|---|---|---|---|---|---|
| | | Non-Dividing | Duration of | Genome | Molecule |
| Delivery | Vector/Mode | Cells | Expression | Integration | Delivered |
| Physical | (e.g., | YES | Transient | NO | Nucleic Acids |
| | electroporation, | | | | and Proteins |
| | particle gun, | | | | |
| | Calcium | | | | |
| | Phosphate | | | | |
| | transfection | | | | |
| Viral | Retrovirus | NO | Stable | YES | RNA |
| | Lentivirus | YES | Stable | YES/NO with | RNA |
| | | | | modification | |
| | Adenovirus | YES | Transient | NO | DNA |
| | Adeno- | YES | Stable | NO | DNA |
| | Associated | | | | |
| | Virus (AAV) | | | | |
| | Vaccinia Virus | YES | Very | NO | DNA |
| | | | Transient | | |
| | Herpes Simplex | YES | Stable | NO | DNA |
| | Virus | | | | |
| Non-Viral | Cationic | YES | Transient | Depends on | Nucleic Acids |
| | Liposomes | | | what is | and Proteins |
| | | | | delivered | |
| | Polymeric | YES | Transient | Depends on | Nucleic Acids |
| | Nanoparticles | | | what is | and Proteins |
| | | | | delivered | |
| Biological | Attenuated | YES | Transient | NO | Nucleic Acids |
| Non-Viral | Bacteria | | | | |
| Delivery | Engineered | YES | Transient | NO | Nucleic Acids |
| Vehicles | Bacteriophages | | | | |
| | Mammalian | YES | Transient | NO | Nucleic Acids |
| | Virus-like | | | | |
| | Particles | | | | |
| | Biological | YES | Transient | NO | Nucleic Acids |
| | liposomes: | | | | |
| | Erythrocyte | | | | |
| | Ghosts and | | | | |
| | Exosomes | | | | |

[0945] In another aspect, the delivery of base editor system components or nucleic acids encoding such components, for example, a polynucleotide programmable nucleotide binding domain (e.g., Cas9) such as, for example, Cas9 or variants thereof, and a gRNA targeting a nucleic acid sequence of interest, may be accomplished by delivering the ribonucleoprotein (RNP) to cells. The RNP comprises a polynucleotide programmable nucleotide binding domain (e.g., Cas9), in complex with the targeting gRNA. RNPs or polynucleotides described herein may be delivered to cells using known methods, such as electroporation, nucleofection, or cationic lipid-mediated methods, for example, as reported by Zuris, J. A. et al., 2015, Nat. Biotechnology, 33(1):73-80, which is incorporated by reference in its entirety. RNPs are advantageous for use in CRISPR base editing systems, particularly for cells that are difficult to transfect, such as primary cells. In addition, RNPs can also alleviate difficulties that may occur with protein expression in cells, especially when eukaryotic promoters, e.g., CMV or EF1A, which may be used in CRISPR plasmids, are not well-expressed. Advantageously, the use of RNPs does not require the delivery of foreign DNA into cells. Moreover, because an RNP comprising a nucleic acid binding protein and gRNA complex is degraded over time, the use of RNPs has the potential to limit off-target effects. In a manner similar to that for plasmid based techniques, RNPs can be used to deliver binding protein (e.g., Cas9 variants) and to direct homology directed repair (HDR).

[0946] Nucleic acid molecules encoding a base editor system can be delivered directly to cells (e.g., T- or NK-cells) as naked DNA or RNA by means of transfection or electroporation, for example, or can be conjugated to molecules (e.g., N-acetylgalactosamine) promoting uptake by the target cells. Vectors encoding base editor systems and/or their components can also be used. In particular embodiments, a polynucleotide, e.g. a mRNA encoding a base editor system or a functional component thereof, may be co-electroporated with one or more guide RNAs as described herein.

[0947] Nucleic acid vectors can comprise one or more sequences encoding a domain of a fusion protein described herein. A vector can also encode a protein component of a base editor system operably linked to a nuclear localization signal, nucleolar localization signal, or mitochondrial localization signal. As one example, a vector can include a Cas9 coding sequence that includes one or more nuclear localization sequences (e.g., a nuclear localization sequence from SV40), and one or more deaminases.

[0948] The vector can also include any suitable number of regulatory/control elements, e.g., promoters, enhancers, introns, polyadenylation signals, Kozak consensus sequences, or internal ribosome entry sites (IRES). These elements are well known in the art.

[0949] Vectors according to this disclosure include recombinant viral vectors. Exemplary viral vectors are set forth herein above. Other viral vectors known in the art can also be used. In addition, viral particles can be used to deliver base editor system components in nucleic acid and/or protein form. For example, “empty” viral particles can be assembled to contain a base editor system or component as cargo. Viral vectors and viral particles can also be engineered to incorporate targeting ligands to alter target tissue specificity.

[0950] Vectors described herein may comprise regulatory elements to drive expression of a base editor system or component thereof. Such vectors include adeno-associated viruses with inverted long terminal repeats (AAV ITR). The use of AAV-ITR can be advantageous for eliminating the need for an additional promoter element, which can take up space in the vector. The additional space freed up can be used to drive the expression of additional elements, such as a guide nucleic acid or a selectable marker. ITR activity can be used to reduce potential toxicity due to over expression.

[0951] Any suitable promoter can be used to drive expression of a base editor system or component thereof and, where appropriate, the guide nucleic acid. For ubiquitous expression, promoters include CMV, CAG, CBh, PGK, SV40, Ferritin heavy or light chains. For brain or other CNS cell expression, suitable promoters include: SynapsinI for all neurons, CaMKIIalpha for excitatory neurons, GAD67 or GAD65 or VGAT for GABAergic neurons. For liver cell expression, suitable promoters include the Albumin promoter. For lung cell expression, suitable promoters include SP-B. For endothelial cells, suitable promoters include ICAM. For hematopoietic cell expression suitable promoters include IFNbeta or CD45. For osteoblast expression suitable promoters can include OG-2.

[0952] In some embodiments, a base editor system of the present disclosure is of small enough size to allow separate promoters to drive expression of the base editor and a compatible guide nucleic acid within the same nucleic acid molecule. For instance, a vector or viral vector can comprise a first promoter operably linked to a nucleic acid encoding the base editor and a second promoter operably linked to the guide nucleic acid.

[0953] The promoter used to drive expression of a guide nucleic acid can include: Pol III promoters, such as U6 or H1 Use of Pol II promoter and intronic cassettes to express gRNA Adeno Associated Virus (AAV).

[0954] In particular embodiments, a fusion protein of the invention is encoded by a polynucleotide present in a viral vector (e.g., adeno-associated virus (AAV), AAV3, AAV3b, AAV4, AAV5, AAV6, AAV7, AAV8, AAV9, AAVrh8, AAV10, and variants thereof), or a suitable capsid protein of any viral vector. Thus, in some aspects, the disclosure relates to the viral delivery of a fusion protein. Examples of viral vectors include retroviral vectors (e.g. Maloney murine leukemia virus, MML-V), adenoviral vectors (e.g. AD100), lentiviral vectors (HIV and FIV-based vectors), herpesvirus vectors (e.g. HSV-2).

[0955] In some aspects, the methods described herein for editing specific genes in a cell can be used to genetically modify an immune cell (e.g., T- or NK-cell). In some embodiments, the methods described herein for editing specific genes in an immune cell can be used to genetically modify a CAR-T cell. Such CAR-T cells, and methods to produce such CAR-T cells are described in International Application Nos. PCT/US2016/060736, PCT/US2016/060734, PCT/US2016/034873, PCT/US2015/040660, PCT/EP2016/055332, PCT/IB2015/058650, PCT/EP2015/067441, PCT/EP2014/078876, PCT/EP2014/059662, PCT/IB2014/061409, PCT/US2016/019192, PCT/US2015/059106, PCT/US2016/052260, PCT/US2015/020606, PCT/US2015/055764, PCT/CN2014/094393, PCT/US2017/059989, PCT/US2017/027606, and PCT/US2015/064269, the contents of each is hereby incorporated in its entirety.

### Viral Vectors

[0956] A base editor described herein can be delivered with a viral vector. In some embodiments, a base editor disclosed herein can be encoded on a nucleic acid that is contained in a viral vector. In some embodiments, one or more components of the base editor system can be encoded on one or more viral vectors. For example, a base editor and guide nucleic acid can be encoded on a single viral vector. In other embodiments, the base editor and guide nucleic acid are encoded on different viral vectors. In either case, the base editor and guide nucleic acid can each be operably linked to a promoter and terminator. The combination of components encoded on a viral vector can be determined by the cargo size constraints of the chosen viral vector.

[0957] The use of RNA or DNA viral based systems for the delivery of a base editor takes advantage of highly evolved processes for targeting a virus to specific cells in culture or in the host and trafficking the viral payload to the nucleus or host cell genome. Viral vectors can be administered directly to cells in culture, patients (in vivo), or they can be used to treat cells in vitro, and the modified cells can optionally be administered to patients (ex vivo). Conventional viral based systems could include retroviral, lentivirus, adenoviral, adeno-associated and herpes simplex virus vectors for gene transfer. Integration in the host genome is possible with the retrovirus, lentivirus, and adeno-associated virus gene transfer methods, often resulting in long term expression of the inserted transgene. Additionally, high transduction efficiencies have been observed in many different cell types and target tissues.

[0958] Viral vectors can include lentivirus (e.g., HIV and FIV-based vectors), Adenovirus (e.g., AD100), Retrovirus (e.g., Maloney murine leukemia virus, MML-V), herpesvirus vectors (e.g., HSV-2), and Adeno-associated viruses (AAVs), or other plasmid or viral vector types, in particular, using formulations and doses from, for example, U.S. Pat. No. 8,454,972 (formulations, doses for adenovirus), U.S. Pat. No. 8,404,658 (formulations, doses for AAV) and U.S. Pat. No. 5,846,946 (formulations, doses for DNA plasmids) and from clinical trials and publications regarding the clinical trials involving lentivirus, AAV and adenovirus. For example, for AAV, the route of administration, formulation and dose can be as in U.S. Pat. No. 8,454,972 and as in clinical trials involving AAV. For Adenovirus, the route of administration, formulation and dose can be as in U.S. Pat. No. 8,404,658 and as in clinical trials involving adenovirus. For plasmid delivery, the route of administration, formulation and dose can be as in U.S. Pat. No. 5,846,946 and as in clinical studies involving plasmids. Doses can be based on or extrapolated to an average 70 kg individual (e.g. a male adult human), and can be adjusted for patients, subjects, mammals of different weight and species. Frequency of administration is within the ambit of the medical or veterinary practitioner (e.g., physician, veterinarian), depending on usual factors including the age, sex, general health, other conditions of the patient or subject and the particular condition or symptoms being addressed. The viral vectors can be injected into the tissue of interest. For cell-type specific base editing, the expression of the base editor and optional guide nucleic acid can be driven by a cell-type specific promoter.

[0959] The tropism of a retrovirus can be altered by incorporating foreign envelope proteins, expanding the potential target population of target cells. Lentiviral vectors are retroviral vectors that are able to transduce or infect non-dividing cells and typically produce high viral titers. Selection of a retroviral gene transfer system would therefore depend on the target tissue. Retroviral vectors are comprised of cis-acting long terminal repeats with packaging capacity for up to 6-10 kb of foreign sequence. The minimum cis-acting LTRs are sufficient for replication and packaging of the vectors, which are then used to integrate the therapeutic gene into the target cell to provide permanent transgene expression. Widely used retroviral vectors include those based upon murine leukemia virus (MuLV), gibbon ape leukemia virus (GaLV), Simian Immuno deficiency virus (SIV), human immuno deficiency virus (HIV), and combinations thereof (See, e.g., Buchscher et al., J. Virol. 66:2731-2739 (1992); Johann et al., J. Virol. 66:1635-1640 (1992); Sommnerfelt et al., Virol. 176:58-59 (1990); Wilson et al., J. Virol. 63:2374-2378 (1989); Miller et al., J. Virol. 65:2220-2224 (1991); PCT/US94/05700).

[0960] Retroviral vectors, especially lentiviral vectors, can require polynucleotide sequences smaller than a given length for efficient integration into a target cell. For example, retroviral vectors of length greater than 9 kb can result in low viral titers compared with those of smaller size. In some aspects, a base editor of the present disclosure is of sufficient size so as to enable efficient packaging and delivery into a target cell via a retroviral vector. In some embodiments, a base editor is of a size so as to allow efficient packing and delivery even when expressed together with a guide nucleic acid and/or other components of a targetable nuclease system.

[0961] Packaging cells are typically used to form virus particles that are capable of infecting a host cell. Such cells include 293 cells, which package adenovirus, and psi.2 cells or PA317 cells, which package retrovirus. Viral vectors used in gene therapy are usually generated by producing a cell line that packages a nucleic acid vector into a viral particle. The vectors typically contain the minimal viral sequences required for packaging and subsequent integration into a host, other viral sequences being replaced by an expression cassette for the polynucleotide(s) to be expressed. The missing viral functions are typically supplied in trans by the packaging cell line. For example, Adeno-associated virus (“AAV”) vectors used in gene therapy typically only possess ITR sequences from the AAV genome which are required for packaging and integration into the host genome. Viral DNA can be packaged in a cell line, which contains a helper plasmid encoding the other AAV genes, namely rep and cap, but lacking ITR sequences. The cell line can also be infected with adenovirus as a helper. The helper virus can promote replication of the AAV vector and expression of AAV genes from the helper plasmid. The helper plasmid in some cases is not packaged in significant amounts due to a lack of ITR sequences. Contamination with adenovirus can be reduced by, e.g., heat treatment to which adenovirus is more sensitive than AAV.In applications where transient expression is preferred, adenoviral based systems can be used. Adenoviral based vectors are capable of very high transduction efficiency in many cell types and do not require cell division. With such vectors, high titer and levels of expression have been obtained. This vector can be produced in large quantities in a relatively simple system. AAV vectors can also be used to transduce cells with target nucleic acids, e.g., in the in vitro production of nucleic acids and peptides, and for in vivo and ex vivo gene therapy procedures (See, e.g., West et al., Virology 160:38-47 (1987); U.S. Pat. No. 4,797,368; WO 93/24641; Kotin, Human Gene Therapy 5:793-801 (1994); Muzyczka, J. Clin. Invest. 94:1351 (1994). The construction of recombinant AAV vectors is described in a number of publications, including U.S. Pat. No. 5,173,414; Tratschin et al., Mol. Cell. Biol. 5:3251-3260 (1985); Tratschin, et al., Mol. Cell. Biol. 4:2072-2081 (1984); Hermonat & Muzyczka, PNAS 81:6466-6470 (1984); and Samulski et al., J. Virol. 63:03822-3828 (1989).

[0962] In some embodiments, AAV vectors are used to transduce a cell of interest with a polynucleotide encoding a base editor or base editor system as provided herein. AAV is a small, single-stranded DNA dependent virus belonging to the parvovirus family. The 4.7 kb wild-type (wt) AAV genome is made up of two genes that encode four replication proteins and three capsid proteins, respectively, and is flanked on either side by 145-bp inverted terminal repeats (ITRs). The virion is composed of three capsid proteins, Vp1, Vp2, and Vp3, produced in a 1:1:10 ratio from the same open reading frame but from differential splicing (Vp1) and alternative translational start sites (Vp2 and Vp3, respectively). Vp3 is the most abundant subunit in the virion and participates in receptor recognition at the cell surface defining the tropism of the virus. A phospholipase domain, which functions in viral infectivity, has been identified in the unique N terminus of Vpl.

[0963] Similar to wt AAV, recombinant AAV (rAAV) utilizes the cis-acting 145-bp ITRs to flank vector transgene cassettes, providing up to 4.5 kb for packaging of foreign DNA. Subsequent to infection, rAAV can express a fusion protein of the invention and persist without integration into the host genome by existing episomally in circular head-to-tail concatemers. Although there are numerous examples of rAAV success using this system, in vitro and in vivo, the limited packaging capacity has limited the use of AAV-mediated gene delivery when the length of the coding sequence of the gene is equal or greater in size than the wt AAV genome.

[0964] Viral vectors can be selected based on the application. For example, for in vivo gene delivery, AAV can be advantageous over other viral vectors. In some embodiments, AAV allows low toxicity, which can be due to the purification method not requiring ultra-centrifugation of cell particles that can activate the immune response. In some embodiments, AAV allows low probability of causing insertional mutagenesis because it doesn't integrate into the host genome. Adenoviruses are commonly used as vaccines because of the strong immunogenic response they induce. Packaging capacity of the viral vectors can limit the size of the base editor that can be packaged into the vector.

[0965] AAV has a packaging capacity of about 4.5 Kb or 4.75 Kb including two 145 base inverted terminal repeats (ITRs). This means disclosed base editor as well as a promoter and transcription terminator can fit into a single viral vector. Constructs larger than 4.5 or 4.75 Kb can lead to significantly reduced virus production. For example, SpCas9 is quite large, the gene itself is over 4.1 Kb, which makes it difficult for packing into AAV. Therefore, embodiments of the present disclosure include utilizing a disclosed base editor which is shorter in length than conventional base editors. In some examples, the base editors are less than 4 kb. Disclosed base editors can be less than 4.5 kb, 4.4 kb, 4.3 kb, 4.2 kb, 4.1 kb, 4 kb, 3.9 kb, 3.8 kb, 3.7 kb, 3.6 kb, 3.5 kb, 3.4 kb, 3.3 kb, 3.2 kb, 3.1 kb, 3 kb, 2.9 kb, 2.8 kb, 2.7 kb, 2.6 kb, 2.5 kb, 2 kb, or 1.5 kb. In some embodiments, the disclosed base editors are 4.5 kb or less in length.

[0966] An AAV can be AAV1, AAV2, AAV5 or any combination thereof. One can select the type of AAV with regard to the cells to be targeted; e.g., one can select AAV serotypes 1, 2, 5 or a hybrid capsid AAV1, AAV2, AAV5 or any combination thereof for targeting brain or neuronal cells; and one can select AAV4 for targeting cardiac tissue. AAV8 is useful for delivery to the liver. A tabulation of certain AAV serotypes as to these cells can be found in Grimm, D. et al, J. Virol. 82: 5887-5911 (2008)).

[0967] In some embodiments, lentiviral vectors are used to transduce an immune cell of interest (e.g., T- or NK-cell) with a polynucleotide encoding a base editor or base editor system as provided herein. In some embodiments, lentiviral vectors are used to transduce an modified immune cell (e.g., T- or NK-cell) with a chimeric antigen receptor (CAR). Lentiviruses are complex retroviruses that have the ability to infect and express their genes in both mitotic and post-mitotic cells. The most commonly known lentivirus is the human immunodeficiency virus (HIV), which uses the envelope glycoproteins of other viruses to target a broad range of cell types.

[0968] Lentiviruses can be prepared as follows. After cloning pCasES10 (which contains a lentiviral transfer plasmid backbone), HEK293FT at low passage (p=5) were seeded in a T-75 flask to 50% confluence the day before transfection in DMEM with 10% fetal bovine serum and without antibiotics. After 20 hours, media is changed to OptiMEM (serum-free) media and transfection was done 4 hours later. Cells are transfected with 10 μg of lentiviral transfer plasmid (pCasES10) and the following packaging plasmids: 5 μg of pMD2.G (VSV-g pseudotype), and 7.5 μg of psPAX2 (gag/pol/rev/tat). Transfection can be done in 4 mL OptiMEM with a cationic lipid delivery agent (50 μl Lipofectamine 2000 and 100 μl Plus reagent). After 6 hours, the media is changed to antibiotic-free DMEM with 10% fetal bovine serum. These methods use serum during cell culture, but serum-free methods are preferred.

[0969] Lentivirus can be purified as follows. Viral supernatants are harvested after 48 hours. Supernatants are first cleared of debris and filtered through a 0.45 μm low protein binding (PVDF) filter. They are then spun in an ultracentrifuge for 2 hours at 24,000 rpm. Viral pellets are resuspended in 50 μl of DMEM overnight at 4° C. They are then aliquoted and immediately frozen at −80° C.

[0970] In another embodiment, minimal non-primate lentiviral vectors based on the equine infectious anemia virus (EIAV) are also contemplated. In another embodiment, RetinoStat®, an equine infectious anemia virus-based lentiviral gene therapy vector that expresses angiostatic proteins endostatin and angiostatin that is contemplated to be delivered via a subretinal injection. In another embodiment, use of self-inactivating lentiviral vectors are contemplated.

[0971] Any RNA of the systems, for example a guide RNA or a base editor-encoding mRNA, can be delivered in the form of RNA. Base editor-encoding mRNA can be generated using in vitro transcription. For example, nuclease mRNA can be synthesized using a PCR cassette containing the following elements: T7 promoter, optional kozak sequence (GCCACC), nuclease sequence, and 3′ UTR such as a 3′ UTR from beta globin-polyA tail. The cassette can be used for transcription by T7 polymerase. Guide polynucleotides (e.g., gRNA) can also be transcribed using in vitro transcription from a cassette containing a T7 promoter, followed by the sequence “GG”, and guide polynucleotide sequence.

[0972] To enhance expression and reduce possible toxicity, the base editor-coding sequence and/or the guide nucleic acid can be modified to include one or more modified nucleoside e.g. using pseudo-U or 5-Methyl-C.

[0973] The small packaging capacity of AAV vectors makes the delivery of a number of genes that exceed this size and/or the use of large physiological regulatory elements challenging. These challenges can be addressed, for example, by dividing the protein(s) to be delivered into two or more fragments, wherein the N-terminal fragment is fused to a split intein-N and the C-terminal fragment is fused to a split intein-C. These fragments are then packaged into two or more AAV vectors. As used herein, “intein” refers to a self-splicing protein intron (e.g., peptide) that ligates flanking N-terminal and C-terminal exteins (e.g., fragments to be joined). The use of certain inteins for joining heterologous protein fragments is described, for example, in Wood et al., J. Biol. Chem. 289(21); 14512-9 (2014). For example, when fused to separate protein fragments, the inteins IntN and IntC recognize each other, splice themselves out and simultaneously ligate the flanking N- and C-terminal exteins of the protein fragments to which they were fused, thereby reconstituting a full-length protein from the two protein fragments. Other suitable inteins will be apparent to a person of skill in the art.

[0974] A fragment of a fusion protein of the invention can vary in length. In some embodiments, a protein fragment ranges from 2 amino acids to about 1000 amino acids in length. In some embodiments, a protein fragment ranges from about 5 amino acids to about 500 amino acids in length. In some embodiments, a protein fragment ranges from about 20 amino acids to about 200 amino acids in length. In some embodiments, a protein fragment ranges from about 10 amino acids to about 100 amino acids in length. Suitable protein fragments of other lengths will be apparent to a person of skill in the art.

[0975] In one embodiment, dual AAV vectors are generated by splitting a large transgene expression cassette in two separate halves (5′ and 3′ ends, or head and tail), where each half of the cassette is packaged in a single AAV vector (of <5 kb). The re-assembly of the full-length transgene expression cassette is then achieved upon co-infection of the same cell by both dual AAV vectors followed by: (1) homologous recombination (HR) between 5′ and 3′ genomes (dual AAV overlapping vectors); (2) ITR-mediated tail-to-head concatemerization of 5′ and 3′ genomes (dual AAV trans-splicing vectors); or (3) a combination of these two mechanisms (dual AAV hybrid vectors). The use of dual AAV vectors in vivo results in the expression of full-length proteins. The use of the dual AAV vector platform represents an efficient and viable gene transfer strategy for transgenes of >4.7 kb in size.

### Inteins

[0976] Inteins (intervening protein) are auto-processing domains found in a variety of diverse organisms, which carry out a process known as protein splicing. Protein splicing is a multi-step biochemical reaction comprised of both the cleavage and formation of peptide bonds. While the endogenous substrates of protein splicing are proteins found in intein-containing organisms, inteins can also be used to chemically manipulate virtually any polypeptide backbone.

[0977] In protein splicing, the intein excises itself out of a precursor polypeptide by cleaving two peptide bonds, thereby ligating the flanking extein (external protein) sequences via the formation of a new peptide bond. This rearrangement occurs post-translationally (or possibly co-translationally). Intein-mediated protein splicing occurs spontaneously, requiring only the folding of the intein domain.

[0978] About 5% of inteins are split inteins, which are transcribed and translated as two separate polypeptides, the N-intein and C-intein, each fused to one extein. Upon translation, the intein fragments spontaneously and non-covalently assemble into the canonical intein structure to carry out protein splicing in trans. The mechanism of protein splicing entails a series of acyl-transfer reactions that result in the cleavage of two peptide bonds at the intein-extein junctions and the formation of a new peptide bond between the N- and C-exteins. This process is initiated by activation of the peptide bond joining the N-extein and the N-terminus of the intein. Virtually all inteins have a cysteine or serine at their N-terminus that attacks the carbonyl carbon of the C-terminal N-extein residue. This N to O/S acyl-shift is facilitated by a conserved threonine and histidine (referred to as the TXXH motif), along with a commonly found aspartate, which results in the formation of a linear (thio)ester intermediate. Next, this intermediate is subject to trans-(thio)esterification by nucleophilic attack of the first C-extein residue (+1), which is a cysteine, serine, or threonine. The resulting branched (thio)ester intermediate is resolved through a unique transformation: cyclization of the highly conserved C-terminal asparagine of the intein. This process is facilitated by the histidine (found in a highly conserved HNF motif) and the penultimate histidine and may also involve the aspartate. This succinimide formation reaction excises the intein from the reactive complex and leaves behind the exteins attached through a non-peptidic linkage. This structure rapidly rearranges into a stable peptide bond in an intein-independent fashion.

[0979] Non-limiting examples of inteins include any intein or intein-pair known in the art, which include a synthetic intein based on the dnaE intein, the Cfa-N (e.g., split intein-N) and Cfa-C (e.g., split intein-C) intein pair, has been described (e.g., in Stevens et al., J Am Chem Soc. 2016 Feb. 24; 138(7):2162-5, incorporated herein by reference), and DnaE. Non-limiting examples of pairs of inteins that may be used in accordance with the present disclosure include: Cfa DnaE intein, Ssp GyrB intein, Ssp DnaX intein, Ter DnaE3 intein, Ter ThyX intein, Rma DnaB intein and Cne Prp8 intein (e.g., as described in U.S. Pat. No. 8,394,604, incorporated herein by reference). Exemplary nucleotide and amino acid sequences of inteins are provided in the Sequence Listing at SEQ ID NOs: 459-466.

[0980] Intein-N and intein-C may be fused to the N-terminal portion of a split Cas9 and the C-terminal portion of the split Cas9, respectively, for the joining of the N-terminal portion of the split Cas9 and the C-terminal portion of the split Cas9. For example, in some embodiments, an intein-N is fused to the C-terminus of the N-terminal portion of the split Cas9, i.e., to form a structure of N—[N-terminal portion of the split Cas9]-[intein-N]—C. In some embodiments, an intein-C is fused to the N-terminus of the C-terminal portion of the split Cas9, i.e., to form a structure of N-[intein-C]--[C-terminal portion of the split Cas9]-C. The mechanism of intein-mediated protein splicing for joining the proteins the inteins are fused to (e.g., split Cas9) is known in the art, e.g., as described in Shah et al., Chem Sci. 2014; 5(1):446-461, incorporated herein by reference. Methods for designing and using inteins are known in the art and described, for example by WO2014004336, WO2017132580, US20150344549, and US20180127780, each of which is incorporated herein by reference in their entirety.

[0981] In some embodiments, a portion or fragment of a nuclease (e.g., Cas9) is fused to an intein. The nuclease can be fused to the N-terminus or the C-terminus of the intein. In some embodiments, a portion or fragment of a fusion protein is fused to an intein and fused to an AAV capsid protein. The intein, nuclease and capsid protein can be fused together in any arrangement (e.g., nuclease-intein-capsid, intein-nuclease-capsid, capsid-intein-nuclease, etc.). In some embodiments, an N-terminal fragment of a base editor (e.g., ABE, CBE) is fused to a split intein-N and a C-terminal fragment is fused to a split intein-C. These fragments are then packaged into two or more AAV vectors. In some embodiments, the N-terminus of an intein is fused to the C-terminus of a fusion protein and the C-terminus of the intein is fused to the N-terminus of an AAV capsid protein.

[0982] In one embodiment, inteins are utilized to join fragments or portions of a cytidine or adenosine base editor protein that is grafted onto an AAV capsid protein. The use of certain inteins for joining heterologous protein fragments is described, for example, in Wood et al., J. Biol. Chem. 289(21); 14512-9 (2014). For example, when fused to separate protein fragments, the inteins IntN and IntC recognize each other, splice themselves out and simultaneously ligate the flanking N- and C-terminal exteins of the protein fragments to which they were fused, thereby reconstituting a full-length protein from the two protein fragments. Other suitable inteins will be apparent to a person of skill in the art.

[0983] In some embodiments, an ABE was split into N- and C-terminal fragments at Ala, Ser, Thr, or Cys residues within selected regions of SpCas9. These regions correspond to loop regions identified by Cas9 crystal structure analysis.

[0984] The N-terminus of each fragment is fused to an intein-N and the C-terminus of each fragment is fused to an intein C at amino acid positions S303, T310, T313, S355, A456, S460, A463, T466, S469, T472, T474, C574, S577, A589, and S590, which are indicated in capital letters in the sequence below (called the “Cas9 reference sequence”).

| (SEQ ID NO: 197) | |
|---|---|
| 1 | mdkkysigld igtnsvgwav itdeykvpsk kfkvlgntdr hsikknliga llfdsgetae |
| 61 | atrlkrtarr rytrrknric ylqeifsnem akvddsffhr leesflveed kkherhpifg |
| 121 | nivdevayhe kyptiyhlrk klvdstdkad lrliylalah mikfrghfli egdlnpdnsd |
| 181 | vdklfiqlvq tynqlfeenp inasgvdaka ilsarlsksr rlenliaqlp gekknglfgn |
| 241 | lialslgltp nfksnfdlae daklqlskdt ydddldnlla qigdqyadlf laaknlsdai |
| 301 | llSdilrvnT eiTkaplsas mikrydehhq dltllkalvr qqlpekykei ffdqSkngya |
| 361 | gyidggasqe efykfikpil ekmdgteell vklnredllr kqrtfdngsi phqihlgelh |
| 421 | ailrrqedfy pflkdnreki ekiltfripy yvgplArgnS rfAwmTrkSe eTiTpwnfee |
| 481 | vvdkgasaqs fiermtnfdk nlpnekvlpk hsllyeyftv yneltkvkyv tegmrkpafl |
| 541 | sgeqkkaivd llfktnrkvt vkqlkedyfk kieCfdSvei sgvedrfnAS lgtyhdllki |
| 601 | ikdkdfldne enedilediv ltltlfedre mieerlktya hlfddkvmkq lkrrrytgwg |
| 661 | rlsrklingi rdkqsgktil dflksdgfan rnfmqlihdd sltfkediqk aqvsgqgdsl |
| 721 | hehianlags paikkgilqt vkvvdelvkv mgrhkpeniv iemarenqtt qkgqknsrer |
| 781 | mkrieegike lgsqilkehp ventqlqnek lylyylqngr dmyvdqeldi nrlsdydvdh |
| 841 | ivpqsflkdd sidnkvltrs dknrgksdnv pseevvkkmk nywrqllnak litqrkfdnl |
| 901 | tkaergglse ldkagfikrq lvetrqitkh vaqildsrmn tkydendkli revkvitlks |
| 961 | klvsdfrkdf qfykvreinn yhhahdayln avvgtalikk ypklesefvy gdykvydvrk |
| 1021 | miakseqeig katakyffys nimnffktei tlangeirkr plietngetg eivwdkgrdf |
| 1081 | atvrkvlsmp qvnivkktev qtggfskesi lpkrnsdkli arkkdwdpkk yggfdsptva |
| 1141 | ysvlvvakve kgkskklksv kellgitime rssfeknpid fleakgykev kkdliiklpk |
| 1201 | yslfelengr krmlasagel qkgnelalps kyvnflylas hyeklkgspe dneqkqlfve |
| 1261 | qhkhyldeii eqisefskrv iladanldkv lsaynkhrdk pireqaenii hlftltnlga |
| 1321 | paafkyfdtt idrkrytstk evldatlihq sitglyetri dlsqlggd |

### Pharmaceutical Compositions

[0985] In some aspects, the present invention provides a pharmaceutical composition comprising any of the genetically modified immune cells, polynucleotides, vectors, base editors, base editor systems, guide polynucleotides, fusion proteins, or the fusion protein-guide polynucleotide complexes described herein. More specifically, provided herein are pharmaceutical compositions comprising a genetically modified immune cell (e.g., T- or NK-cell), or a population of such immune cells, wherein said modified immune cell has at least one edited gene involved in hypoxic and adenosinergic pathways (e.g., A2AR, A2BR, HIF1α, HIF1α.I3), or regulatory elements thereof, to provide increased resistance to hypoxic-adenosinergic immunosuppression and/or increased cytokine production. In some embodiments, the at least one edited gene is A2AR, A2BR, HIF1α, and/or HIF1α.I3. In embodiments, the pharmaceutical compositions comprise or are administered in combination with an A2AR, A2BR, HIF1α, and/or HIF1α.I3 antagonist (e.g., AZD4635).

[0986] The pharmaceutical compositions of the present invention can be prepared in accordance with known techniques. See, e.g., Remington, The Science And Practice of Pharmacy (21st ed. 2005). In general, the cell, or population thereof is admixed with a suitable carrier prior to administration or storage, and in some embodiments, the pharmaceutical composition further comprises a pharmaceutically acceptable carrier. Suitable pharmaceutically acceptable carriers generally comprise inert substances that aid in administering the pharmaceutical composition to a subject, aid in processing the pharmaceutical compositions into deliverable preparations, or aid in storing the pharmaceutical composition prior to administration. Pharmaceutically acceptable carriers can include agents that can stabilize, optimize or otherwise alter the form, consistency, viscosity, pH, pharmacokinetics, solubility of the formulation. Such agents include buffering agents, wetting agents, emulsifying agents, diluents, encapsulating agents, and skin penetration enhancers. For example, carriers can include, but are not limited to, saline, buffered saline, dextrose, arginine, sucrose, water, glycerol, ethanol, sorbitol, dextran, sodium carboxymethyl cellulose, and combinations thereof.

[0987] Some nonlimiting examples of materials which can serve as pharmaceutically-acceptable carriers include: (1) sugars, such as lactose, glucose and sucrose; (2) starches, such as corn starch and potato starch; (3) cellulose, and its derivatives, such as sodium carboxymethyl cellulose, methylcellulose, ethyl cellulose, microcrystalline cellulose and cellulose acetate; (4) powdered tragacanth; (5) malt; (6) gelatin; (7) lubricating agents, such as magnesium stearate, sodium lauryl sulfate and talc; (8) excipients, such as cocoa butter and suppository waxes; (9) oils, such as peanut oil, cottonseed oil, safflower oil, sesame oil, olive oil, corn oil and soybean oil; (10) glycols, such as propylene glycol; (11) polyols, such as glycerin, sorbitol, mannitol and polyethylene glycol (PEG); (12) esters, such as ethyl oleate and ethyl laurate; (13) agar; (14) buffering agents, such as magnesium hydroxide and aluminum hydroxide; (15) alginic acid; (16) pyrogen-free water; (17) isotonic saline; (18) Ringer's solution; (19) ethyl alcohol; (20) pH buffered solutions; (21) polyesters, polycarbonates and/or polyanhydrides; (22) bulking agents, such as polypeptides and amino acids (23) serum alcohols, such as ethanol; and (23) other non-toxic compatible substances employed in pharmaceutical formulations. Wetting agents, coloring agents, release agents, coating agents, sweetening agents, flavoring agents, perfuming agents, preservative and antioxidants can also be present in the formulation.

[0988] Pharmaceutical compositions can comprise one or more pH buffering compounds to maintain the pH of the formulation at a predetermined level that reflects physiological pH, such as in the range of about 5.0 to about 8.0. The pH buffering compound used in the aqueous liquid formulation can be an amino acid or mixture of amino acids, such as histidine or a mixture of amino acids such as histidine and glycine. Alternatively, the pH buffering compound is preferably an agent which maintains the pH of the formulation at a predetermined level, such as in the range of about 5.0 to about 8.0, and which does not chelate calcium ions. Illustrative examples of such pH buffering compounds include, but are not limited to, imidazole and acetate ions. The pH buffering compound may be present in any amount suitable to maintain the pH of the formulation at a predetermined level.

[0989] Pharmaceutical compositions can also contain one or more osmotic modulating agents, i.e., a compound that modulates the osmotic properties (e.g., tonicity, osmolality, and/or osmotic pressure) of the formulation to a level that is acceptable to the blood stream and blood cells of recipient individuals. The osmotic modulating agent can be an agent that does not chelate calcium ions. The osmotic modulating agent can be any compound known or available to those skilled in the art that modulates the osmotic properties of the formulation. One skilled in the art may empirically determine the suitability of a given osmotic modulating agent for use in the inventive formulation. Illustrative examples of suitable types of osmotic modulating agents include, but are not limited to: salts, such as sodium chloride and sodium acetate; sugars, such as sucrose, dextrose, and mannitol; amino acids, such as glycine; and mixtures of one or more of these agents and/or types of agents. The osmotic modulating agent(s) may be present in any concentration sufficient to modulate the osmotic properties of the formulation.

[0990] In addition to a modified immune cell, or population thereof, and a carrier, the pharmaceutical compositions of the present invention can include at least one additional therapeutic agent useful in the treatment of disease. For example, some embodiments of the pharmaceutical composition described herein further comprises a chemotherapeutic agent. In some embodiments, the pharmaceutical composition further comprises a cytokine peptide or a nucleic acid sequence encoding a cytokine peptide. In some embodiments, the pharmaceutical compositions comprising the modified immune cell or population thereof can be administered separately from an additional therapeutic agent.

[0991] One consideration concerning the therapeutic use of genetically modified cells of the invention is the quantity of cells necessary to achieve an optimal or satisfactory effect. The quantity of cells to be administered may vary for the subject being treated. In one embodiment, between 10⁴ to 10¹⁰, between 10⁵ to 10⁹, or between 10⁶ and 10⁸ genetically modified immune cells of the invention are administered to a human subject. In some embodiments, at least about 1×10⁸, 2×10⁸, 3×10⁸, 4×10⁸, and 5×10⁸ genetically modified cells of the invention are administered to a human subject. Determining the precise effective dose may be based on factors for each individual subject, including their size, age, sex, weight, and condition. Dosages can be readily ascertained by those skilled in the art from this disclosure and the knowledge in the art.

[0992] The skilled artisan can readily determine the number of cells and amount of optional additives, vehicles, and/or carriers in compositions and to be administered in methods of the invention. Typically, additives (in addition to the cell(s)) are present in an amount of 0.001 to 50% (weight) solution in phosphate buffered saline, and the active ingredient is present in the order of micrograms to milligrams, such as about 0.0001 to about 5 wt %, preferably about 0.0001 to about 1 wt %, still more preferably about 0.0001 to about 0.05 wt % or about 0.001 to about 20 wt %, preferably about 0.01 to about 10 wt %, and still more preferably about 0.05 to about 5 wt %. Of course, for any composition to be administered to an animal or human, and for any particular method of administration, it is preferred to determine therefore: toxicity, such as by determining the lethal dose (LD) and LD50 in a suitable animal model (e.g., a rodent such as a mouse); and, the dosage of the composition(s), concentration of components therein, and the timing of administering the composition(s), which elicit a suitable response. Such determinations do not require undue experimentation from the knowledge of the skilled artisan, this disclosure and the documents cited herein. And, the time for sequential administrations can be ascertained without undue experimentation.

[0993] In some embodiments, the pharmaceutical composition is formulated for delivery to a subject. Suitable routes of administrating the pharmaceutical composition described herein include, without limitation: topical, subcutaneous, transdermal, intradermal, intralesional, intraarticular, intraperitoneal, intravesical, transmucosal, gingival, intradental, intracochlear, transtympanic, intraorgan, epidural, intrathecal, intramuscular, intravenous, intravascular, intraosseus, periocular, intratumoral, intracerebral, and intracerebroventricular administration.

[0994] In some embodiments, the pharmaceutical composition described herein is administered locally to a diseased site (e.g., solid tumor microenvironment). In some embodiments, the pharmaceutical composition described herein is administered to a subject by injection, by means of a catheter, by means of a suppository, or by means of an implant, the implant being of a porous, non-porous, or gelatinous material, including a membrane, such as a sialastic membrane, or a fiber.

[0995] In other embodiments, the pharmaceutical composition described herein is delivered in a controlled release system. In one embodiment, a pump can be used (see, e.g., Langer, 1990, Science 249: 1527-1533; Sefton, 1989, CRC Crit. Ref. Biomed. Eng. 14:201; Buchwald et al., 1980, Surgery 88:507; Saudek et al., 1989, N. Engl. J. Med. 321:574). In another embodiment, polymeric materials can be used. (See, e.g., Medical Applications of Controlled Release (Langer and Wise eds., CRC Press, Boca Raton, Fla., 1974); Controlled Drug Bioavailability, Drug Product Design and Performance (Smolen and Ball eds., Wiley, New York, 1984); Ranger and Peppas, 1983, Macromol. Sci. Rev. Macromol. Chem. 23:61. See also Levy et al., 1985, Science 228: 190; During et al., 1989, Ann. Neurol. 25:351; Howard et al., 1989, J. Neurosurg. 71: 105.) Other controlled release systems are discussed, for example, in Langer, supra.

[0996] In some embodiments, the pharmaceutical composition is formulated in accordance with routine procedures as a composition adapted for intravenous or subcutaneous administration to a subject, e.g., a human. In some embodiments, pharmaceutical composition for administration by injection are solutions in sterile isotonic use as solubilizing agent and a local anesthetic such as lignocaine to ease pain at the site of the injection. Generally, the ingredients are supplied either separately or mixed together in unit dosage form, for example, as a dry lyophilized powder or water free concentrate in a hermetically sealed container such as an ampoule or sachette indicating the quantity of active agent. Where the pharmaceutical is to be administered by infusion, it can be dispensed with an infusion bottle containing sterile pharmaceutical grade water or saline. Where the pharmaceutical composition is administered by injection, an ampoule of sterile water for injection or saline can be provided so that the ingredients can be mixed prior to administration.

[0997] A pharmaceutical composition for systemic administration can be a liquid, e.g., sterile saline, lactated Ringer's or Hank's solution. In addition, the pharmaceutical composition can be in solid forms and re-dissolved or suspended immediately prior to use. Lyophilized forms are also contemplated. The pharmaceutical composition can be contained within a lipid particle or vesicle, such as a liposome or microcrystal, which is also suitable for parenteral administration. The particles can be of any suitable structure, such as unilamellar or plurilamellar, so long as compositions are contained therein. Compounds can be entrapped in “stabilized plasmid-lipid particles” (SPLP) containing the fusogenic lipid dioleoylphosphatidylethanolamine (DOPE), low levels (5-10 mol %) of cationic lipid, and stabilized by a polyethyleneglycol (PEG) coating (Zhang Y. P. et al., Gene Ther. 1999, 6: 1438-47). Positively charged lipids such as N-[1-(2,3-dioleoyloxi)propyl]-N,N,N-trimethyl-amoniummethylsulfate, or “DOTAP,” are particularly preferred for such particles and vesicles. The preparation of such lipid particles is well known. See, e.g., U.S. Pat. Nos. 4,880,635; 4,906,477; 4,911,928; 4,917,951; 4,920,016; and 4,921,757; each of which is incorporated herein by reference.

[0998] The pharmaceutical composition described herein can be administered or packaged as a unit dose, for example. The term “unit dose” when used in reference to a pharmaceutical composition of the present disclosure refers to physically discrete units suitable as unitary dosage for the subject, each unit containing a predetermined quantity of active material calculated to produce the desired therapeutic effect in association with the required diluent; i.e., carrier, or vehicle.

[0999] Further, the pharmaceutical composition can be provided as a pharmaceutical kit comprising (a) a container containing a compound of the invention in lyophilized form and (b) a second container containing a pharmaceutically acceptable diluent (e.g., sterile used for reconstitution or dilution of the lyophilized compound of the invention. Optionally associated with such container(s) can be a notice in the form prescribed by a governmental agency regulating the manufacture, use or sale of pharmaceuticals or biological products, which notice reflects approval by the agency of manufacture, use or sale for human administration.

[1000] In another aspect, an article of manufacture containing materials useful for the treatment of the diseases described above is included. In some embodiments, the article of manufacture comprises a container and a label. Suitable containers include, for example, bottles, vials, syringes, and test tubes. The containers can be formed from a variety of materials such as glass or plastic. In some embodiments, the container holds a composition that is effective for treating a disease described herein and can have a sterile access port. For example, the container can be an intravenous solution bag or a vial having a stopper pierceable by a hypodermic injection needle. The active agent in the composition is a compound of the invention. In some embodiments, the label on or associated with the container indicates that the composition is used for treating the disease of choice. The article of manufacture can further comprise a second container comprising a pharmaceutically-acceptable buffer, such as phosphate-buffered saline, Ringer's solution, or dextrose solution. It can further include other materials desirable from a commercial and user standpoint, including other buffers, diluents, filters, needles, syringes, and package inserts with instructions for use.

[1001] In some embodiments, any of the fusion proteins, gRNAs, and/or complexes described herein are provided as part of a pharmaceutical composition. In some embodiments, the pharmaceutical composition comprises any of the fusion proteins provided herein. In some embodiments, the pharmaceutical composition comprises any of the complexes provided herein. In some embodiments, the pharmaceutical composition comprises a ribonucleoprotein complex comprising an RNA-guided nuclease (e.g., Cas9) that forms a complex with a gRNA and a cationic lipid. In some embodiments pharmaceutical composition comprises a gRNA, a nucleic acid programmable DNA binding protein, a cationic lipid, and a pharmaceutically acceptable excipient. Pharmaceutical compositions can optionally comprise one or more additional therapeutically active substances.

[1002] In some embodiments, compositions provided herein are administered to a subject, for example, to a human subject, in order to effect a targeted genomic modification within the subject. In some embodiments, cells are obtained from the subject and contacted with any of the pharmaceutical compositions provided herein. In some embodiments, cells removed from a subject and contacted ex vivo with a pharmaceutical composition are re-introduced into the subject, optionally after the desired genomic modification has been effected or detected in the cells. Methods of delivering pharmaceutical compositions comprising nucleases are known, and are described, for example, in U.S. Pat. Nos. 6,453,242; 6,503,717; 6,534,261; 6,599,692; 6,607,882; 6,689,558; 6,824,978; 6,933,113; 6,979,539; 7,013,219; and 7,163,824, the disclosures of all of which are incorporated by reference herein in their entireties. Although the descriptions of pharmaceutical compositions provided herein are principally directed to pharmaceutical compositions which are suitable for administration to humans, it will be understood by the skilled artisan that such compositions are generally suitable for administration to animals or organisms of all sorts, for example, for veterinary use.

[1003] Modification of pharmaceutical compositions suitable for administration to humans in order to render the compositions suitable for administration to various animals is well understood, and the ordinarily skilled veterinary pharmacologist can design and/or perform such modification with merely ordinary, if any, experimentation. Subjects to which administration of the pharmaceutical compositions is contemplated include, but are not limited to, humans and/or other primates; mammals, domesticated animals, pets, and commercially relevant mammals such as cattle, pigs, horses, sheep, cats, dogs, mice, and/or rats; and/or birds, including commercially relevant birds such as chickens, ducks, geese, and/or turkeys.

[1004] Formulations of the pharmaceutical compositions described herein can be prepared by any method known or hereafter developed in the art of pharmacology. In general, such preparatory methods include the step of bringing the active ingredient(s) into association with an excipient and/or one or more other accessory ingredients, and then, if necessary and/or desirable, shaping and/or packaging the product into a desired single- or multi-dose unit. Pharmaceutical formulations can additionally comprise a pharmaceutically acceptable excipient, which, as used herein, includes any and all solvents, dispersion media, diluents, or other liquid vehicles, dispersion or suspension aids, surface active agents, isotonic agents, thickening or emulsifying agents, preservatives, solid binders, lubricants and the like, as suited to the particular dosage form desired. Remington's The Science and Practice of Pharmacy, 21st Edition, A. R. Gennaro (Lippincott, Williams & Wilkins, Baltimore, MD, 2006; incorporated in its entirety herein by reference) discloses various excipients used in formulating pharmaceutical compositions and known techniques for the preparation thereof. See also PCT application PCT/US2010/055131 (Publication number WO2011/053982 A8, filed Nov. 2, 2010), incorporated in its entirety herein by reference, for additional suitable methods, reagents, excipients and solvents for producing pharmaceutical compositions comprising a nuclease.

[1005] Except insofar as any conventional excipient medium is incompatible with a substance or its derivatives, such as by producing any undesirable biological effect or otherwise interacting in a deleterious manner with any other component(s) of the pharmaceutical composition, its use is contemplated to be within the scope of this disclosure.

[1006] The compositions, as described above, can be administered in effective amounts. The effective amount will depend upon the mode of administration, the particular condition being treated, and the desired outcome. It may also depend upon the stage of the condition, the age and physical condition of the subject, the nature of concurrent therapy, if any, and like factors well-known to the medical practitioner. For therapeutic applications, it is that amount sufficient to achieve a medically desirable result.

[1007] In some embodiments, compositions in accordance with the present disclosure can be used for treatment of any of a variety of diseases, disorders, and/or conditions. In some embodiments, the pharmaceutical compositions of the present invention can be used to treat any disease or condition (e.g., cancer, neoplasias, solid tumors) that is susceptible to hypoxia-adenosinergic immunosuppression. In some embodiments, the pharmaceutical compositions of the present invention are used to treat solid tumors.

### Methods of Treatment

[1008] Some aspects of the present invention provide methods of treating a subject in need, the method comprising administering to a subject in need an effective therapeutic amount of a pharmaceutical composition as described herein. More specifically, the methods of treatment include administering to a subject in need thereof one or more pharmaceutical compositions comprising one or more immune cells having at least one edited gene. In other embodiments, the methods of the invention comprise expressing or introducing into an immune cell a base editor polypeptide and one or more guide RNAs capable of targeting a nucleic acid molecule encoding at least one polypeptide. In some embodiments, the invention provides methods of treating a subject in need with a solid tumor.

[1009] In some embodiments, the methods of treatment comprise administering to a subject in need thereof a pharmaceutical composition comprising a population of modified immune cells having at least one edited gene (e.g., A2AR, A2BR, HIF1α, HIF1α.I3), wherein the at least one edited gene increases the immune cell's resistance to hypoxia-adenosinergic immunosuppression. In embodiments, the pharmaceutical compositions comprise or are administered in combination with an A2AR, A2BR, HIF1α, and/or HIF1α.I3 antagonist (e.g., AZD4635). In some embodiments, the methods of treatment comprise administering to a subject an effective amount of a modified immune effector cell (e.g., CAR-T cell) or a population thereof that has at least one single target nucleobase modification in one or more of genes in a hypoxic and/or adenosinergic pathway component or a regulatory element thereof (e.g., A2AR, A2BR, HIF1α, and/or HIF1α.I3) and has increased resistance to hypoxia-adenosinergic immunosuppression. In some embodiments, the methods of treatment comprise administering to a subject an effective amount of a modified immune effector cell (e.g., CAR-T cell) or a population thereof that has at least one single target nucleobase modification in one or more of genes in a hypoxic and/or adenosinergic pathway component or a regulatory element thereof (e.g., A2AR, A2BR, HIF1α, and/or HIF1α.I3) and has increased cytokine production. In some embodiments, the one or more of genes involved in a hypoxic and/or adenosinergic pathway component or a regulatory element thereof are selected from one or more of A2AR, A2BR, HIF1α, and/or HIF1α.I3. In some embodiments, the modified immune cell is a T cell. In some embodiments, the modified immune cell is a CAR-T cell.

[1010] In one embodiment, a subject is administered at least 0.1×10⁵ cells, at least 0.5×10⁵ cells, at least 1×10⁵ cells, at least 5×10⁵ cells, at least 1×10⁶ cells, at least 0.5×10⁷ cells, at least 1×10⁷ cells, at least 0.5×10⁸ cells, at least 1×10⁸ cells, at least 0.5×10⁹ cells, at least 1×10⁹ cells, at least 2×10⁹ cells, at least 3×10⁹ cells, at least 4×10⁹ cells, at least 5×10⁹ cells, or at least 1×10¹⁰ cells. In particular embodiments, about 1×10⁷ cells to about 1×10⁹ cells, about 2×10⁷ cells to about 0.9×10⁹ cells, about 3×10⁷ cells to about 0.8×10⁹ cells, about 4×10⁷ cells to about 0.7×10⁹ cells, about 5×10⁷ cells to about 0.6×10⁹ cells, or about 5×10⁷ cells to about 0.5×10⁹ cells are administered to the subject.

[1011] In one embodiment, a subject is administered at least 0.1×10⁴ cells/kg of bodyweight, at least 0.5×10⁴ cells/kg of bodyweight, at least 1×10⁴ cells/kg of bodyweight, at least 5×10⁴ cells/kg of bodyweight, at least 1×10⁵ cells/kg of bodyweight, at least 0.5×10⁶ cells/kg of bodyweight, at least 1×10⁶ cells/kg of bodyweight, at least 0.5×10⁷ cells/kg of bodyweight, at least 1×10⁷ cells/kg of bodyweight, at least 0.5×10⁸ cells/kg of bodyweight, at least 1×10⁸ cells/kg of bodyweight, at least 2×10⁸ cells/kg of bodyweight, at least 3×10⁸ cells/kg of bodyweight, at least 4×10⁸ cells/kg of bodyweight, at least 5×10⁸ cells/kg of bodyweight, or at least 1×10′ cells/kg of bodyweight. In particular embodiments, about 1×10⁶ cells/kg of bodyweight to about 1×10⁸ cells/kg of bodyweight, about 2×10⁶ cells/kg of bodyweight to about 0.9×10⁸ cells/kg of bodyweight, about 3×10⁶ cells/kg of bodyweight to about 0.8×10⁸ cells/kg of bodyweight, about 4×10⁶ cells/kg of bodyweight to about 0.7×10⁸ cells/kg of bodyweight, about 5×10⁶ cells/kg of bodyweight to about 0.6×10⁸ cells/kg of bodyweight, or about 5×10⁶ cells/kg of bodyweight to about 0.5×10⁸ cells/kg of bodyweight are administered to the subject.

[1012] One of ordinary skill in the art would recognize that multiple administrations of the pharmaceutical compositions contemplated in particular embodiments may be required to affect the desired therapy. For example, a composition may be administered to the subject 1, 2, 3, 4, 5, 6, 7, 8, 9, or 10 or more times over a span of 1 week, 2 weeks, 3 weeks, 1 month, 2 months, 3 months, 4 months, 5 months, 6 months, 1 year, 2 years, 5, years, 10 years, or more. In any of such methods, the methods may comprise administering to the subject an effective amount of an modified immune cell or a base editor system or polynucleotide encoding such system. In any of such methods, the methods may comprise administering one or more doses of an effective amount of the modified immune cells per day. In any of such methods, the methods may comprise administering two or more doses of an effective amount of the modified immune cells per day. In any of such methods, the methods may comprise administering three or more doses of an effective amount of the modified immune cells per day. In any of such methods, the methods may comprise administering one or more doses of an effective amount of the modified immune cells per week. In any of such methods, the methods may comprise administering two or more doses of an effective amount of the modified immune cells per week. In any of such methods, the methods may comprise administering three or more doses of an effective amount of the modified immune cells per week. In any of such methods, the methods may comprise administering one or more doses of an effective amount of the modified immune cells per month. In any of such methods, the methods may comprise administering two or more doses of an effective amount of the modified immune cells per month. In any of such methods, the methods may comprise administering three or more doses of an effective amount of the modified immune cells per month.

[1013] Administration of the pharmaceutical compositions contemplated herein may be carried out using conventional techniques including, but not limited to, infusion, transfusion, or parenterally. In some embodiments, parenteral administration includes infusing or injecting intravascularly, intravenously, intramuscularly, intraarterially, intrathecally, intratumorally, intradermally, intraperitoneally, transtracheally, subcutaneously, subcuticularly, intraarticularly, subcapsularly, subarachnoidly and intrasternally.

[1014] In some embodiments, a composition described herein (e.g., modified immune cell, base editor system) is administered in a dosage that is about 0.5-30 mg per kilogram body weight of the human subject. In another embodiment, the amount of the composition administered is about 0.5-20 mg per kilogram body weight of the human subject. In another embodiment, the amount of the composition administered is about 0.5-10 mg per kilogram body weight of the human subject. In another embodiment, the amount of the composition administered is about 0.04 mg, about 0.08 mg, about 0.16 mg, about 0.32 mg, about 0.64 mg, about 1.25 mg, about 1.28 mg, about 1.92 mg, about 2.5 mg, about 3.56 mg, about 3.75 mg, about 5.0 mg, about 7.12 mg, about 7.5 mg, about 10 mg, about 14.24 mg, about 15 mg, about 20 mg, or about 30 mg per kilogram body weight of the human subject. In another embodiment, the amount of the compo composition und administered is about 1.92 mg, about 3.75 mg, about 7.5 mg, about 15.0 mg, or about 30.0 mg per kilogram body weight of the human subject and the composition is administered two times a week. In another embodiment, the amount of the composition administered is about 1.28 mg, about 2.56 mg, about 5.0 mg, about 10 mg, or about 20 mg per kilogram body weight of the human subject and the composition is administered two times a week. In another embodiment, the amount of the composition administered is about 1.92 mg, about 3.75 mg, about 7.5 mg, about 15.0 mg, or about 30.0 mg per kilogram body weight of the human subject and the composition is administered once a week. In another embodiment, the amount of the composition administered is about 1.28 mg, about 2.56 mg, about 5.0 mg, about 10 mg, or about 20 mg per kilogram body weight of the human subject and the composition is administered once a week. In another embodiment, the amount of the composition administered is about 1.92 mg, about 3.75 mg, about 7.5 mg, about 15.0 mg, or about 30.0 mg per kilogram body weight of the human subject and the composition is administered once a day three, five or seven times in a seven day period. In another embodiment, the composition is administered intravenously once a day, seven times in a seven day period. In another embodiment, the amount of the composition administered is about 1.28 mg, about 2.56 mg, about 5.0 mg, about 10 mg, or about 20 mg per kilogram body weight of the human subject and the composition is administered once a day three, five or seven times in a seven day period. In another embodiment, the composition is administered intravenously once a day, seven times in a seven day period.

[1015] In some embodiments, the composition is administered over a period of 0.25 h, 0.5 h, 1 h, 2 h, 3 h, 4 h, 5 h, 6 h, 7 h, 8 h, 9 h, 10 h, 11 h, or 12 h. In another embodiment, the composition is administered over a period of 0.25-2 h. In another embodiment, the composition is gradually administered over a period of 1 h. In another embodiment, the composition is gradually administered over a period of 2 h.

### Kits

[1016] The invention provides kits for the treatment of cancers, neoplasias, solid tumors in a subject. The invention further provides kits featuring a modified immune cell (e.g., T- or NK-cell) as provided herein. In some embodiments, the kit includes a modified CAR-T cell as provided herein. In some embodiments, the kit further includes a base editor, base editor system or a polynucleotide encoding a base editor or base editor system as provided herein. In some embodiments, the kit further includes one or more guide polynucleotides (e.g., a guide polynucleotide targeting a genomic sequence) as provided herein. In some embodiments, the base editor system comprises a nucleic acid programmable DNA binding protein (napDNAbp), a deaminase (e.g., cytidine deaminase or adenosine deaminase), and a guide RNA for modifying an immune cell (e.g., T- or NK-cell). In some embodiments, the deaminase is a cytidine deaminase or an adenosine deaminase. In some embodiments, the base editor is an ABE, CBE, or ABE/CBE. In some embodiments, the guide RNA targets a site selected from those listed in Table 1A and/or a site corresponding to a spacer listed in Table 1A or Table 1B.

[1017] The kits may further comprise written instructions for using the base editor, base editor system and/or modified immune cell as described herein. In other embodiments, the instructions include at least one of the following: precautions; warnings; clinical studies; and/or references. The instructions may be printed directly on the container (when present), or as a label applied to the container, or as a separate sheet, pamphlet, card, or folder supplied in or with the container. In a further embodiment, a kit can comprise instructions in the form of a label or separate insert (package insert) for suitable operational parameters. In yet another embodiment, the kit can comprise one or more containers with appropriate positive and negative controls or control samples, to be used as standard(s) for detection, calibration, or normalization. The kit can further comprise a second container comprising a pharmaceutically-acceptable buffer, such as (sterile) phosphate-buffered saline, Ringer's solution, or dextrose solution. It can further include other materials desirable from a commercial and user standpoint, including other buffers, diluents, filters, needles, syringes, and package inserts with instructions for use.

[1018] The practice of the present invention employs, unless otherwise indicated, conventional techniques of molecular biology (including recombinant techniques), microbiology, cell biology, biochemistry and immunology, which are well within the purview of the skilled artisan. Such techniques are explained fully in the literature, such as, “Molecular Cloning: A Laboratory Manual”, second edition (Sambrook, 1989); “Oligonucleotide Synthesis” (Gait, 1984); “Animal Cell Culture” (Freshney, 1987); “Methods in Enzymology” “Handbook of Experimental Immunology” (Weir, 1996); “Gene Transfer Vectors for Mammalian Cells” (Miller and Calos, 1987); “Current Protocols in Molecular Biology” (Ausubel, 1987); “PCR: The Polymerase Chain Reaction”, (Mullis, 1994); “Current Protocols in Immunology” (Coligan, 1991). These techniques are applicable to the production of the polynucleotides and polypeptides of the invention, and, as such, may be considered in making and practicing the invention. Particularly useful techniques for particular embodiments will be discussed in the sections that follow.

[1019] The following examples are put forth so as to provide those of ordinary skill in the art with a complete disclosure and description of how to make and use the assay, screening, and therapeutic methods of the invention, and are not intended to limit the scope of what the inventors regard as their invention.

### EXAMPLES

### Example 1: Knocking Out HIF1α, A2AR, or A2BR Had Minimal or No Impact on CAR Expression in CAR T Cells

[1020] As a first step in developing chimeric antigen receptor (CAR) T cells genetically resistant to hypoxia-adenosinergic immunosuppression and, thus, having improved capacity to be used in the clinical treatment of solid tumors, the impact on CAR expression of knocking out the target genes HIF1a, A2AR, or A2BR using base editors was evaluated. HIF1α, A2AR, or A2BR were chosen as targets for knocking out using base editing because, as shown in FIGS. 1, 2A, and 2B, these genes encode proteins playing a role in the hypoxic and adenosinergic pathways that play synergistic roles in suppressing T cells in the tumor microenvironment. Knocking out one or more of these target genes is associated with a reduction in suppression of T cells in the tumor microenvironment (e.g., a hypoxic environment and/or an environment comprising elevated levels of adenosine). Indeed, as shown in FIGS. 2A and 2B, adenosine receptor antagonists alleviate T cell immunosuppression in the tumor microenvironment.

[1021] As shown in FIG. 3, it was determined using next generation sequencing of edited cells that a cytosine base editor (CBE) (rBE4) used in combination with gRNA 145 to edit A2AR and with gRNA 222 to edit A2BR, an adenosine base editor ABE (ABE8.20) used in combination with gRNA 155 to edit A2AR, with gRNA 170 or 172 to edit HIF1a, or with gRNA 221 to edit A2BR, or Cas9 used in combination with an A2A Cas9 guide RNA or an A2B Cas9 guide RNA yielded high molecular editing (i.e., base editing efficiencies>90%) at the targeted sites in CAR-T cells. The guide RNA sequences target a site provided in Table 1A or corresponding to a spacer listed in Table 1A and/or Table 1B. Further, as shown in FIGS. 4A-4C, 60% chimeric antigen receptor (CAR) expression was seen across all guides and editing targets. No impact was observed on CAR expression. The CAR-T cells expressed an anti-human EGFR CAR polypeptide.

### Example 2: Knocking Out HIF1α Increased Cytokine Production Under Hypoxic Stress Relative to Unedited CAR T Cells

[1022] Next, experiments were completed to identify top-performing guide RNAs for use in knocking out the HIF1a gene using base editing. As shown in FIG. 5, it was determined through next generation sequencing (NGS) that guides 158, 170, and 173 in conjunction with an ABE (ABE8.20) resulted in HIF1α gene editing.

[1023] Transcripts produced from the edited HIF1α genes were analyzed using RNAseq to determine the impact of the edits on transcription and splicing. As shown in FIGS. 6A-6D, it was determined that guides 170 and 173 were associated with edits that decreased transcription of the HIF1α gene.

[1024] Editing of the HIF1α gene using guides 170 and 173 altered the splicing of mRNA transcribed from the edited genes (see FIGS. 9A and 9B), as determined using RNAseq. Without intending to be bound by theory, such alterations in splicing were associated with edits made proximal to the interface of introns and exons in the HIFIla gene (see, e.g., the sites targeted by Guide 170 and 173, as indicated in FIGS. 8A and 8B). In other words, without intending to be bound by theory, it is likely that guides 170 and 173 targeted different intron/exon splice sites across the HIF1α gene (see FIGS. 8A and 8B) and the edits associated with the use of these guides resulted in improper splicing, leading to effective protein knockout. As shown in FIGS. 9A and 9B, more robust editing and intron retention was associated with guide 173 than with guide 170. The HIF1α gene sequence is provided in the sequence listing as SEQ ID NO: 377.

[1025] In some embodiments editing of a target site in the HIF1α gene is associated with knocking out of a particular isoform of HIF1α (see FIG. 7). For example, while not being bound by theory, knocking out expression of the HIF1cαI3 isoform while leaving ubiquitous HIF1α intact is associated in some instances with increased cytokine production under hypoxic stress.

[1026] The impact of knocking out the HIF1a gene using guides 170 and 173 on cytokine production by anti-EGFR CAR-T cells under hypoxic stress was evaluated. The EGFR CAR-T cells were co-cultured at an E:T ratio of 1:1 with either SKOV3 or H226 cells in 1% O₂ for 48 hours. The HIF1α gene knockout edits resulted in increased cytokine production under hypoxic stress compared to unedited CAR-T cells, as shown in FIG. 10.

### Example 3: Knocking Out A2AR Protected CAR-T Cells from Adenosine-Mediated Cytokine Suppression

[1027] Next, gRNAs were screened for use in knocking out the A2AR gene. As shown in FIGS. 11 and 12, the A2AR gene is a component of the hypoxia-adenosinergic axis involved in suppressing cytotoxic T cell function in response to hypoxia. Thus, knocking out the A2AR gene is associated with a reduction in hypoxia/adenosine-mediated suppression of cytotoxic T cell function. Further, as shown in FIG. 12, knocking out of the A2BR gene has a similar effect. Without intending to be bound by theory, activation of A2AR (A2A in FIG. 12) and/or A2BR (A2B in FIG. 12) in response to hypoxia/adenosine result in an increase in intracellular levels of cAMP and pCREB.

[1028] As shown in FIG. 13, it was determined through next generation sequencing (NGS) that guides 145 and 155 effectively edited the A2AR gene when using either a CBE (rBE4) or ABE (ABE8.20). Knocking out of the A2AR gene abrogated adenosine signaling and resulted in lack of upregulation in edited CAR-T cells of pCREB in the presence of 2-chloroadenosine (see FIG. 14). Further, it was determined that knocking out of the A2AR gene was associated with protection of the CAR-T cells from adenosine-mediated cytokine production (see FIG. 15).

### Example 4: Identifying gRNAs for Knocking Out A2BR

[1029] As noted above in Example 3, knocking out the A2BR gene reduced suppression of CAR T-cell cytokine production associated with hypoxic microenvironments and/or in microenvironments containing adenosine (FIG. 16). Thus, guide RNAs were screened for use in knocking out the A2BR gene using the cytosine base editor (CBE) rBE4 or the adenosine base editor (ABE) ABE8.20. Using next generation sequencing, it was determined that gRNA 221 in conjunction with an ABE (ABE8.20), and gRNA 222 in conjunction with a CBE (rBE4) achieved editing efficiencies of greater than about 95%.

### Example 5: Multiplex Base Editing Protected Allogeneic EGFR-Targeting CAR-T Cells from Inhibition by Extracellular Adenosine in the Tumor Microenvironment

[1030] Due to the powerful immunosuppression generated the tumor microenvironment (TME), clinical CAR-T efficacy against solid tumors to-date has been minimal. CAR-T cells encounter both biochemical and immunological barriers in the TME, including the hypoxia-driven accumulation of extracellular adenosine (Ado). Signaling by Ado through A2A adenosine receptors (A2AR) on T cells significantly inhibits many effector functions including cytokine section and anti-tumor cytotoxicity (FIG. 18A). Generating CAR-T cells that are genetically-resistant to adenosinergic signaling can prevent their suppression within the TME. As one approach to increasing the quality of the cell product and expanding patient access to these treatments, these therapies can be derived from healthy donor-derived allogeneic cells. Base editing can target gene splice sites to simultaneously knock out multiple genes without introducing double strand DNA breaks (FIGS. 18B and 18C). Leveraging the base editing platform provided herein, experiments were undertaken to produce and evaluate T cells base-edited to knock-out expression of endogenous TCR, HLA Class I, HLA Class II, and A2AR to produce allogeneic Adenosine-Resistant CAR-T cells (ARC T cells).

[1031] First, experiments were undertaken to produce ARC T cells. The cells were produced according to the scheme shown in FIG. 19D first transducing the cells with polynucleotides encoding an anti-EGFR chimeric antigen receptor (CAR) and then using electroporation to introduce to the cells base editor systems for knocking out expression of TCR, HLA Class I, HLA Class II, and A2AR using one of the two A2AR-targeting base-editing systems listed in Table 20 and each of the base editing systems targeting CD3ε, B2M, and CIITA listed in Table 20 (see Tables 1A and 1B for spacer sequences). The cells were base edited to knock-out expression of A2AR using either sgRNA 155 in combination with ABE8.20 or sgRNA 145 in combination with a CBE. Base editing using the guide sgRNA 155 in combination with ABE8.20 or the guide sgRNA 145 in combination with a CBE was effective in editing the A2AR gene to knock-out expression of A2AR in anti-EGFR T cells (FIG. 19A). The guides TSBTx4073, TSBTx760, and TSBTx763 used in combination with ABE8.20 were effective in base editing genes encoding CD3F, B2M, and CIITA to knock-out the expression thereof in the anti-EGFR T cells (FIG. 19B). The base edits to knock out A2AR expression did not adversely impact chimeric antigen receptor expression in the edited cells (FIG. 19C).

TABLE 20
Base editing systems used to prepare ARC T cells.

| Target | target site name | Guide ID | Editor |
|---|---|---|---|
| A2AR | RCM sgRNA 155 | TSBTx2043 | ABE8.20 |
| A2AR | RCM sgRNA 145 | TSBTx2042 | CBE (rBE4) |
| CD3ε | AE_gRNA_566 | TSBTx4073 | ABE8.20 |
| B2M | B2M | TSBTx760 | ABE8.20 |
| CIITA | CIITA exon 16 SD | TSBTx763 | ABE8.20 |

[1032] Experiments were next undertaken to determine whether the adenosine-resistant CAR-T cells were protected from adenosine-mediated suppression in vitro. First, flow cytometry was used to confirm that downstream signaling of A2AR was prevented in ARC T cells, as indicated by a reduction in phosphorylated CREB staining (FIG. 20A). Flow cytometry measurements also confirmed that the ARC T cells maintained the capacity to produce IFNγ when exposed to extracellular adenosine for 48 hours, while unedited cells did not. It was determined in vitro that the anti-EGFR ARC T cells were effective at killing H266 spheroid cells when contacted with H266 spheroids for a period of 9 days (FIGS. 20C and 20D). The anti-EGFR ARC T cells maintained cytotoxicity against the H266 spheroids even in the presence of 20 μM adenosine (FIGS. 20D and 20E). Unedited CAR T cells and untransduced T cells (i.e., unedited T cells not expressing any chimeric antigen receptor (CAR)) did not have cytotoxicity against the H266 spheroid cells in the presence of adenosine.

The in vivo efficacy of the ARC T cells was analyzed in a xenograft model of non-small cell lung cancer characterized as a squamous cell carcinoma. This was done by injecting NCI-H226 sells subcutaneously in an immunodeficient mouse, the NCG mouse. The NCG mouse lacks functional/mature T, B, and NK cells, and has reduced macrophage and dendritic cell function (FIG. 21A). NCG mice having an H226 xenograft were injected 2-3 weeks following administration of the H226 cells with 150 μL ARC T cells, unedited CAR t cells, or untransduced T cells (i.e., unedited T cells not expressing any chimeric antigen receptor) at three doses: 2×10⁶, 4×10⁶, or 8×10⁶ cells, or with control cells: anti-EGFR CAR T cells expressing the adenosine receptor and untransduced (UTD) cells. Alterations in tumor volume were monitored over 3-4 weeks. Measurements demonstrated that the tumor microenvironment (TMV) in the xenograft model included hypoxic conditions and cells expressing the adenosine-producing ectoenzyme CD73 (FIG. 21). Calipers were used to measure the tumors over time, and the measurements were used to calculate tumor volume. Once tumor volume reached 140 mm³, measurements of tumor size were taken every 2-3 days. Dramatic decreases in tumor volume were observed for tumors treated with the edited A2AR knockout anti-EGFR CAR-T cells (FIGS. 17A-17C). In fact, at every dose tested better tumor control was observed in mice treated with the edited A2AR knockout anti-EGFR CAR-T cells relative to mice treated with the unedited A2AR-expressing anti-EGFR CAR-T cells. Interestingly, while virtually no reduction in tumor volume was observed in mice that received the lowest dose tested, i.e., 2×10⁶ unedited A2AR-expressing anti-EGFR CAR-T cells, mice that received the same number of edited A2AR knockout anti-EGFR CAR-T cells displayed significantly lower tumor volume.

[1033] As demonstrated above, base editing enabled generation of multiplex-edited allogeneic CAR-T cells (i.e., ARC T cells) that exhibited enhanced potency against solid tumors in vivo and in vitro. In particular, elimination of adenosine-mediated immunosuppression in ARC T cells enhanced anti-tumor function. ARC T cells demonstrated reduction of A2AR signaling via lack of downstream phosphorylated CREB after stimulation with exogenous adenosine. ARC T cells produced greater levels of cytokine and exhibited superior anti-tumor cytotoxicity in the presence of exogenous adenosine in vitro. Also, ARC T cells showed increased in vivo anti-tumor potency in a mouse xenograft solid tumor model as compared to unedited CAR-T cells, most notably at a sub-optimal cell dosage.

### Example 6: Preparation of Multiplex-Edited Cells with TGFbR Expression Knocked-Out

[1034] Experiments were undertaken to prepare chimeric antigen receptor-expressing T cells (CAR T cells) base edited to knock out expression of TGFbR with or without expression of one or more of expression of A2AR, PD1, and/or TGFbR knocked out.

[1035] First, an experiment was undertaken to identify guides capable of facilitating knock-out of TGFbR2 or TGFbR1 in EGFR-targeting CAR T cells when used in combination with ABE8.20 or Cas12b (FIGS. 23 and 24 and Table 1B). The following guides were evaluated g258, g259, g260, g261, g262, g263, g264, g265, g266, g267, g268, g269, g270, g271, g272, g273, g274, g275 (see Table 1B). The base editor used in combination with the guides was ABE8.20. Knock-out efficiency was measured by measuring the levels of phospho-SMAD in the edited cells using a phosphor-SMAD assay (FIG. 22), which involved stimulating the CAR T cells with 10 ng/mL rhTGFb1 or DMSO for 20 minutes at 37° C., followed by permeabilization and staining of the cells. The cells were stained using a phospho-SMAD2/3 antibody and measurements of staining were made using flow cytometry (FIGS. 23 and 24). The guides g262, g272, and g273 were effective at facilitating editing to knock-out expression of TGFbR (FIGS. 23 and 24). Knocking out of TGFbR expression in the CAR T cells did not adversely impact expression levels of the chimeric antigen receptor in the CAR T cells (FIG. 25).

[1036] Next, EGFR-targeting CAR T cells were edited to knock-out expression one or more of A2AR, PD1, and TGFbR and CAR expression was then measured in the cells using flow cytometry (FIG. 25). A2AR expression was knocked out using the guide TSBTx2043, PD1 expression was knocked out using the guide TSBTx025, and TGFbR expression was knocked out using the guide TSBTx5277. Knocking out one or more of A2AR, PD1, and/or TGFbR in the CAR T cells did not adversely impact chimeric antigen receptor expression in the cells.

### Example 7: Base Editing of Chimeric Antigen Receptor (CAR) T Cells to Knock-Out Expression of HIF-1a Isoform 3 Improved Cytokine Secretion

[1037] Experiments were undertaken to determine the impact of knocking out HIF-1a isoform 3 on cytokine production by anti-EGFR CAR T cells. First, anti-EGFR CAR T cells were produced by transducing T cells from donors with polynucleotides encoding an anti-EGFR CAR. The transduced CAR T cells surface-expressed the anti-EGFR CAR (FIG. 26A). Then, the guide polynucleotide TSBTx4470 (sgRNA 230) was designed to target an adenosine base editor (ABE) to deaminate a nucleobase in a start codon of a HIF-1a isoform 3 polynucleotide to knock out expression of HIF-1a isoform 3 in a cell. High base editing efficiencies were achieved in anti-EGFR CAR T cells contacted with a base editor system containing the guide polynucleotide TSBTx4470 (sgRNA 230) and the ABE (FIG. 26B). The base edited anti-EGFR CAR T cells showed superior cytokine secretion relative to anti-EGFR CAR T cells that were not base edited to knock out expression of the HIF-1a isoform 3 polypeptide when co-cultured in the presence of H226 tumor cells (1:2 effector to target cell ratio) under both normoxia (20% oxygen) and hypoxia (1% oxygen) conditions (FIG. 26C). Therefore, use of base editing to knock out expression of HIF-1a isoform 3 was an effective strategy for improving cytokine secretion of the CAR T cells under both hypoxic and normoxic conditions.

### Example 8: Improved Tumor Clearance by Base Edited Anti-EGFR Chimeric Antigen Receptor (CAR) T Cells In Vivo

[1038] Experiments were Undertaken to Evaluate In Vivo Tumor Clearance in Mice by Anti-EGFR CAR T cells base edited to knock out A2AR, B2M, CD3ε, CIITA, PD1, and/or TGFbR2. The mice were administered H226 mesothelioma cells subcutaneously and subsequently administered a dose of 2e6 or 4e6 of base edited anti-EGFR CAR T cells.

[1039] Three different base edited anti-EGFR CAR T cells were evaluated: CAR (base edited to knock-out expression of CD3ε, B2M, and CIITA), A2AR (base edited to knock-out expression of CD3ε, B2M, CIITA, and A2AR), and TKO (base edited to knock-out expression of CD3ε, B2M, CIITA, A2AR, and PD1, and edited using a nuclease to knock-out expression of TGFbR2). TGFbR2 was knocked-out using the guide polynucleotide TSBTx5277 in combination with Cas12b. Knock-out of all other targets (A2AR, CD3ε, B2M, CIITA, and PD1) was carried out using base editing. A2AR was base edited using ABE8.20 in combination with the guide polynucleotide TSBTx2043. CD3F was base edited using ABE8.20 in combination with the guide polynucleotide TSBTx4073. B2M was base edited using ABE8.20 in combination with the guide polynucleotide TSBTx760. CIITA was base edited using ABE8.20 in combination with the guide polynucleotide TSBTx763. PD1 was base edited using ABE8.20 in combination with the guide polynucleotide TSBTx025.

[1040] All of the base-edited CAR T cells were capable of reducing tumor volume in the mice at both doses evaluated (FIGS. 27 and 28). The TKO CAR T cells were capable of eliminating all or nearly all tumor cells from the mice within 50 days at both doses evaluated. Tumor clearance increased with dose.

[1041] The following materials and methods were employed in the above examples.

### Hypoxia Suppression Assay Protocol

[1042] The purpose of this protocol was, among other things, was to analyze cytokine release from CAR-T cells in response to tumor targets in the presence of 1% oxygen.

[1043] The reagents used in this protocol included CAR-T cells, SKOV3 cells, NCI-H226 Tumor cells, 96-well flat bottom plates (untreated), T cell growth media (TCGM) without IL2, dimethyl sulfoxide (DMSO), and phosphate-buffered saline (PBS).

[1044] The protocol involved the following steps:
[1045] 1. Harvesting and counting T cells and tumor targets.
[1046] 2. Washing T cells and tumor cells with 1×PBS.
[1047] 3. Spinning down and resuspending both at 1e6/mL in TCGM without IL2.
[1048] 4. Plating 100 μL T cells and 100 μL tumor targets per well into 96-well flat bottom plate.
   [1049] a. For T cell alone conditions, adding 100 μL TCGM without IL2.
   [1050] b. The result was a 1:1 E:T ratio: 100k T cells, and 100k tumor cells per well.
[1051] 5. Placing at 37° C. in an incubator with oxygen levels set to 1% for 48 hours.
[1052] 6. After 48h spinning plate down at 500g for 5 mins.
[1053] 7. Removing ˜150 μL supernatant and transferring to new 96-well plate.
[1054] 8. Running on Ella™ (a device for next generation enzyme-linked immunosorbent assays).
   [1055] a. Typical Dilutions for CAR-T cytokine production were 10-50x depending on CAR and tumor target.

### Adenosine Suppression Assay Protocol

[1056] The purpose of this protocol was, among other things, to analyze cytokine release from CAR-T cells in response to tumor targets in the presence of extracellular adenosine.

[1057] The reagents used in this protocol included CAR-T cells, SKOV3 cells, NCI-H226 Tumor cells, 96-well flat bottom plates (untreated), T cell growth media (TCGM) without IL2, dimethyl sulfoxide (DMSO), 2-chloro-adenosine (CADO), and phosphate-buffere saline (PBS).

[1058] The protocol involved the following steps:
[1059] 1. Harvesting and counting T cells and tumor targets.
[1060] 2. Washing T cells and tumor cells with PBS 1×.
[1061] 3. Spinning down and resuspending both at 2e6/mL in TCGM without IL2.
[1062] 4. Making up 2X stimulation solutions:
   [1063] a. Making a 20 μM CADO solution in TCGM without IL2.
   [1064] b. Using the same volume of DMSO to make up a control solution for unstimulated conditions.
[1065] 5. Plating 50 μL T cells and 50 μL tumor targets per well into 96-well flat bottom plate.
   [1066] a. For the T cell alone conditions, adding 100 μL 2×DMSO solution.
   [1067] b. For adenosine stimulated conditions, adding 100 μL 2×CADO solution.
      [1068] Final concentration was 10 μM CADO in the assay.
   [1069] c. Result was 1:1 E:T ratio corresponding to 50k T cells and 50k tumor cells per well.
[1070] 6. Placing at 37° C. for 48 hours.
[1071] 7. After 48h spinning the plate down at 500g for 5 mins.
[1072] 8. Removing about 150 μL supernatant and transferring to a new 96-well plate.
[1073] 9. Running on Ella™ (a device for next generation enzyme-linked immunosorbent assays).
   [1074] a. Typical Dilutions for CAR-T cytokine production were 10-50x, depending on the CAR and the tumor target.
      pCREB Protocol

[1075] The purpose of this protocol, among other things, was to determine intracellular levels of phosphorylated cAMP Response Element Binding (CREB) protein in human T cells. The reagents used in this protocol included Primary human T cells, phosphate-buffered saline (PBS), fluorescence-activated cell sorting (FACS) buffer, XVIVO-15 medium, dimethyl sulfoxide (DMSO), 2-chloroadenosine (CADO), pCREB-FITC antibody (Cell Signaling), BD Cytofix™ Buffer, BD Perm III Buffer.

[1076] The protocol involved the following steps:

### Day 0 (Serum Starvation)

[1077] 1. Harvesting the appropriate number of T cells for the assay from culture and transfer them into a 50 mL conical tube.
[1078] 2. Rinsing cells with PBS.
[1079] 3. Centrifuging cells at 500×g for 5 mins.
[1080] 4. Resuspending the T cells in XVIVO-15 medium at a concentration of 1e6 cells/mL and placing in a 37° C. incubator with 1% 02 levels.
[1081] 5. Resting the cells in 1% 02 for 48 hours.

### Day 2 (Stimulation)

[1082] 1. Pre-warming BD Cytofix in a 37° C. water bath.
[1083] 2. Pre-incubating the BD Perm Buffer III at −20° C.
[1084] 3. Rinsing serum-starved T cells with PBS.
[1085] 4. Resuspending the T cells at 2e6/mL in XVIVO-15
[1086] 5. Plating 50 μL of the T cell suspension into a 96-well U-bottom plate.
[1087] 6. Preparing a 2× concentration of XVIVO 15+CADO at 60 μM.
   [1088] a. The final assay stimulation concentration was 30 uM.
[1089] 7. Preparing a 2× concentration of XVIVO-15+DMSO, where the volume of DMSO used was equal in volume to the volume of CADO used to prepare the 2× concentrated XVIVO 15+CADO mixture.
[1090] 8. Stimulating the cells by adding 50 μL of either 2×DMSO or 2×CADO solution to each well.
[1091] 9. Immediately after addition of cell stimulation solutions, transferring the plate into a 37° C. incubator and incubating for 1 hour.
[1092] 10. After 1 hour, using a multichannel pipet, adding 100 μL pre-warmed Cytofix Buffer to each well, and pipetting up and down to mix.
[1093] 11. Transferring the plate back into a 37° C. incubator and incubating for 15 mins.
[1094] 12. Centrifuging the plate at 500×g for 5 minutes.
[1095] 13. Decanting the supernatant.
[1096] 14. Using a multichannel pipet to slowly add 100 μL of pre-chilled Perm Buffer III.
[1097] 15. Incubating at 4° C. for 30 minutes.
[1098] 16. Centrifuging the plate at 500×g for 5 minutes.
[1099] 17. Decanting the supernatant.
[1100] 18. Resuspending the cells in 200 μL fluorescence-activated cell sorting (FACS) buffer to wash.
[1101] 19. Spinning the cells down at 500g for 5 mins.
[1102] 20. Preparing the pFlow antibody master mix for staining panel.
   [1103] a. 5 μL/test for pCREB-FITC.
[1104] 21. Resuspending cell pellets in 100 μL antibody cocktail.
[1105] 22. Incubating for 30 mins at room temperature (RT) in the dark.
[1106] 23. Washing the cells with 100 μL FACS buffer.
[1107] 24. Spinning down the cells at 500g for 5 mins.
[1108] 25. Decanting the supernatant and resuspending in 200 μL FACS Buffer.
[1109] 26. Running the samples on a MACSQuantl6 analyzer.

### Electroporation (EP) Protocol

[1110] The purpose of this protocol, among other things, was to electroporate (EP) T cells using a Lonza Amaxa instrument at 100Lp scale.

[1111] The reagents used in this protocol included primary human cells (PBMC, TCT, T cells), phosphate-buffered saline (PBS), P3 electroporation (EP) Buffer, XVIVO-15 medium (no serum, no buffer, no IL2), T cell growth medium (TCGM)+IL2, rBE4 mRNA (2 mg/mL), Guide RNA (Biospring 2 mg/mL).

[1112] The protocol involved the following steps:
[1113] 1. Thawing an aliquot of mRNA/gRNA on ice.
   [1114] a. Also thawing an aliquot of P3 EP buffer on ice.
[1115] 2. Harvesting cells and spinning down at 500g for 5 mins.
[1116] 3. Resuspending the cell pellet in XVIVO-15 and counting the cells using a NucleoCounter® NC-200.
[1117] 4. Aliquoting the number of cells needed for EP into a 50 mL conical tube(s).
[1118] 5. Spinning down at 500g for 5 mins and aspirating.
[1119] 6. Using P3 buffer to resuspend cells at 100e6/mL.
[1120] 7. Preparing 2× mRNA/gRNA master mix (MM) containing 5 μL mRNA, 2.5p L of each gRNA needed, and 35 μL P3 buffer per 5e6 cells.
[1121] 8. Combining a 100e6/mL cell suspension 1:1 v/v with 2× mRNA/gRNA MM for n+1 electroporations (Eps).
   [1122] i. 50 μL cells+50 μL 2× MM=100 μL per electroporation (EP).
[1123] 9. Aliquoting 100 μL per EP cuvette.
   [1124] a. 5e6 cells in 100 μL per zap.
[1125] 10. Tapping EP cuvette on bench to ensure entire cell suspension is in the bottom of cuvette, touching the metal plates.
[1126] 11. Placing the cuvette in the Lonza Amaxa electroporator and electroporating (EP).
[1127] 12. After EP, adding 100 μL prewarmed TCGM+IL2 to each cuvette to quench the reaction.
   [1128] a. Pipetting up and down to ensure entire 200 μL contents is removed from cuvette.
[1129] 13. Transferring the entire 200 μL to 5 mL prewarmed TXGM+IL2 in 6-well GRex®.
[1130] 14. Placing at 37° C. to allow for cell expansion.

### Other Embodiments

[1131] From the foregoing description, it will be apparent that variations and modifications may be made to the invention described herein to adopt it to various usages and conditions. Such embodiments are also within the scope of the following claims.

[1132] The recitation of a listing of elements in any definition of a variable herein includes definitions of that variable as any single element or combination (or subcombination) of listed elements. The recitation of an embodiment herein includes that embodiment as any single embodiment or in combination with any other embodiments or portions thereof.

[1133] All patents and publications mentioned in this specification are herein incorporated by reference to the same extent as if each independent patent and publication was specifically and individually indicated to be incorporated by reference.

The application's sequence listing, which the Patent Office published only in electronic form, follows.

SEQUENCE LISTING (515 sequences)

SEQ ID NO: 1 - protein, 167 aa, Escherichia coli
  REGION 1..167: note = misc_feature - TadA*7.10 (ecTadA) polypeptide sequence
MSEVEFSHEYWMRHALTLAKRARDEREVPVGAVLVLNNRVIGEGWNRAIGLHDPTAHAEIMALRQGGLVMQNYRLIDATLYVTFEPCVMCAGAMIHSRIGRVVFGVRNAKTGAAGSLMDVLHYPGMNHRVEITEGILADECAALLCYFFRMPRQVFNAQKKAQSSTD

SEQ ID NO: 2 - DNA, 4092 bp, synthetic construct
  misc_feature 1..4092: note = BhCas12b GGSGGS-ABE8-Xten20at P153 polynucleotide sequence
  misc_feature 1..6: note = Kozak sequence
  misc_feature 7..57: note = Sequence encoding N-terminal nuclear localization signal
  misc_feature 58..513: note = Sequence encoding BhCas12b
  misc_feature 514..531: note = Sequence encoding a linker
  misc_feature 532..1029: note = Sequence encoding TadA*8
  misc_feature 1030..1089: note = Sequence encoding Xten20 linker
  misc_feature 1090..3954: note = Sequence encoding BhCas12b
  misc_feature 3955..4002: note = Sequence encoding C-terminal NLS
  misc_feature 4003..4008: note = Sequence encoding GS linker
  misc_feature 4009..4089: note = Sequence encoding 3x hemagglutinin (HA) tag
  source 1..4092: mol_type = other DNA
gccaccatggccccaaagaagaagcggaaggtcggtatccacggagtcccagcagccgccaccagatccttcatcctgaagatcgagcccaacgaggaagtgaagaaaggcctctggaaaacccacgaggtgctgaaccacggaatcgcctactacatgaatatcctgaagctgatccggcaagaggccatctacgagcaccacgagcaggaccccaagaatcccaagaaggtgtccaaggccgagatccaggccgagctgtgggatttcgtgctgaagatgcagaagtgcaacagcttcacacacgaggtggacaaggacgaggtgttcaacatcctgagagagctgtacgaggaactggtgcccagcagcgtggaaaagaagggcgaagccaaccagctgagcaacaagtttctgtaccctctggtggaccccaacagccagtctggaaagggaacagccagcagcggcagaaagcccagatggtacaacctgaagattgccggcgatcccggaggctctggaggaagctccgaagtcgagttttcccatgagtactggatgagacacgcattgactctcgcaaagagggctcgagatgaacgcgaggtgcccgtgggggcagtactcgtgctcaacaatcgcgtaatcggcgaaggttggaatagggcaatcggactccacgaccccactgcacatgcggaaatcatggcccttcgacagggagggcttgtgatgcagaattatcgactttatgatgcgacgctgtacgtcacgtttgaaccttgcgtaatgtgcgcgggagctatgattcactcccgcattggacgagttgtattcggtgttcgcaacgccaagacgggtgccgcaggttcactgatggacgtgctgcatcatccaggcatgaaccaccgggtagaaatcacagaaggcatattggcggacgaatgtgcggcgctgttgtgtcgtttttttcgcatgcccaggcgggtctttaacgcccagaaaaaagcacaatcctctactgacggctcttctggatctgaaacacctggcacaagcgagagcgccacccctgagagctctggctcctgggaagaagagaagaagaagtgggaagaagataagaaaaaggacccgctggccaagatcctgggcaagctggctgagtacggactgatccctctgttcatcccctacaccgacagcaacgagcccatcgtgaaagaaatcaagtggatggaaaagtcccggaaccagagcgtgcggcggctggataaggacatgttcattcaggccctggaacggttcctgagctgggagagctggaacctgaaagtgaaagaggaatacgagaaggtcgagaaagagtacaagaccctggaagagaggatcaaagaggacatccaggctctgaaggctctggaacagtatgagaaagagcggcaagaacagctgctgcgggacaccctgaacaccaacgagtaccggctgagcaagagaggccttagaggctggcgggaaatcatccagaaatggctgaaaatggacgagaacgagccctccgagaagtacctggaagtgttcaaggactaccagcggaagcaccctagagaggccggcgattacagcgtgtacgagttcctgtccaagaaagagaaccacttcatctggcggaatcaccctgagtacccctacctgtacgccaccttctgcgagatcgacaagaaaaagaaggacgccaagcagcaggccaccttcacactggccgatcctatcaatcaccctctgtgggtccgattcgaggaaagaagcggcagcaacctgaacaagtacagaatcctgaccgagcagctgcacaccgagaagctgaagaaaaagctgacagtgcagctggaccggctgatctaccctacagaatctggcggctgggaagagaagggcaaagtggacattgtgctgctgcccagccggcagttctacaaccagatcttcctggacatcgaggaaaagggcaagcacgccttcacctacaaggatgagagcatcaagttccctctgaagggcacactcggcggagccagagtgcagttcgacagagatcacctgagaagataccctcacaaggtggaaagcggcaacgtgggcagaatctacttcaacatgaccgtgaacatcgagcctacagagtccccagtgtccaagtctctgaagatccaccgggacgacttccccaaggtggtcaacttcaagcccaaagaactgaccgagtggatcaaggacagcaagggcaagaaactgaagtccggcatcgagtccctggaaatcggcctgagagtgatgagcatcgacctgggacagagacaggccgctgccgcctctattttcgaggtggtggatcagaagcccgacatcgaaggcaagctgtttttcccaatcaagggcaccgagctgtatgccgtgcacagagccagcttcaacatcaagctgcccggcgagacactggtcaagagcagagaagtgctgcggaaggccagagaggacaatctgaaactgatgaaccagaagctcaacttcctgcggaacgtgctgcacttccagcagttcgaggacatcaccgagagagagaagcgggtcaccaagtggatcagcagacaagagaacagcgacgtgcccctggtgtaccaggatgagctgatccagatccgcgagctgatgtacaagccttacaaggactgggtcgccttcctgaagcagctccacaagagactggaagtcgagatcggcaaagaagtgaagcactggcggaagtccctgagcgacggaagaaagggcctgtacggcatctccctgaagaacatcgacgagatcgatcggacccggaagttcctgctgagatggtccctgaggcctaccgaacctggcgaagtgcgtagactggaacccggccagagattcgccatcgaccagctgaatcacctgaacgccctgaaagaagatcggctgaagaagatggccaacaccatcatcatgcacgccctgggctactgctacgacgtgcggaagaagaaatggcaggctaagaaccccgcctgccagatcatcctgttcgaggatctgagcaactacaacccctacgaggaaaggtcccgcttcgagaacagcaagctcatgaagtggtccagacgcgagatccccagacaggttgcactgcagggcgagatctatggcctgcaagtgggagaagtgggcgctcagttcagcagcagattccacgccaagacaggcagccctggcatcagatgtagcgtcgtgaccaaagagaagctgcaggacaatcggttcttcaagaatctgcagagagagggcagactgaccctggacaaaatcgccgtgctgaaagagggcgatctgtacccagacaaaggcggcgagaagttcatcagcctgagcaaggatcggaagtgcgtgaccacacacgccgacatcaacgccgctcagaacctgcagaagcggttctggacaagaacccacggcttctacaaggtgtactgcaaggcctaccaggtggacggccagaccgtgtacatccctgagagcaaggaccagaagcagaagatcatcgaagagttcggcgagggctacttcattctgaaggacggggtgtacgaatgggtcaacgccggcaagctgaaaatcaagaagggcagctccaagcagagcagcagcgagctggtggatagcgacatcctgaaagacagcttcgacctggcctccgagctgaaaggcgaaaagctgatgctgtacagggaccccagcggcaatgtgttccccagcgacaaatggatggccgctggcgtgttcttcggaaagctggaacgcatcctgatcagcaagctgaccaaccagtactccatcagcaccatcgaggacgacagcagcaagcagtctatgaaaaggccggcggccacgaaaaaggccggccaggcaaaaaagaaaaagggatcctacccatacgatgttccagattacgcttatccctacgacgtgcctgattatgcatacccatatgatgtccccgactatgcctaa

SEQ ID NO: 3 - protein, 1361 aa, synthetic construct
  REGION 1..1361: note = BhCas12b GGSGGS-ABE8-Xten20at P153 polypeptide sequence
MAPKKKRKVGIHGVPAAATRSFILKIEPNEEVKKGLWKTHEVLNHGIAYYMNILKLIRQEAIYEHHEQDPKNPKKVSKAEIQAELWDFVLKMQKCNSFTHEVDKDEVFNILRELYEELVPSSVEKKGEANQLSNKFLYPLVDPNSQSGKGTASSGRKPRWYNLKIAGDPGGSGGSSEVEFSHEYWMRHALTLAKRARDEREVPVGAVLVLNNRVIGEGWNRAIGLHDPTAHAEIMALRQGGLVMQNYRLYDATLYVTFEPCVMCAGAMIHSRIGRVVFGVRNAKTGAAGSLMDVLHHPGMNHRVEITEGILADECAALLCRFFRMPRRVFNAQKKAQSSTDGSSGSETPGTSESATPESSGSWEEEKKKWEEDKKKDPLAKILGKLAEYGLIPLFIPYTDSNEPIVKEIKWMEKSRNQSVRRLDKDMFIQALERFLSWESWNLKVKEEYEKVEKEYKTLEERIKEDIQALKALEQYEKERQEQLLRDTLNTNEYRLSKRGLRGWREIIQKWLKMDENEPSEKYLEVFKDYQRKHPREAGDYSVYEFLSKKENHFIWRNHPEYPYLYATFCEIDKKKKDAKQQATFTLADPINHPLWVRFEERSGSNLNKYRILTEQLHTEKLKKKLTVQLDRLIYPTESGGWEEKGKVDIVLLPSRQFYNQIFLDIEEKGKHAFTYKDESIKFPLKGTLGGARVQFDRDHLRRYPHKVESGNVGRIYFNMTVNIEPTESPVSKSLKIHRDDFPKVVNFKPKELTEWIKDSKGKKLKSGIESLEIGLRVMSIDLGQRQAAAASIFEVVDQKPDIEGKLFFPIKGTELYAVHRASFNIKLPGETLVKSREVLRKAREDNLKLMNQKLNFLRNVLHFQQFEDITEREKRVTKWISRQENSDVPLVYQDELIQIRELMYKPYKDWVAFLKQLHKRLEVEIGKEVKHWRKSLSDGRKGLYGISLKNIDEIDRTRKFLLRWSLRPTEPGEVRRLEPGQRFAIDQLNHLNALKEDRLKKMANTIIMHALGYCYDVRKKKWQAKNPACQIILFEDLSNYNPYEERSRFENSKLMKWSRREIPRQVALQGEIYGLQVGEVGAQFSSRFHAKTGSPGIRCSVVTKEKLQDNRFFKNLQREGRLTLDKIAVLKEGDLYPDKGGEKFISLSKDRKCVTTHADINAAQNLQKRFWTRTHGFYKVYCKAYQVDGQTVYIPESKDQKQKIIEEFGEGYFILKDGVYEWVNAGKLKIKKGSSKQSSSELVDSDILKDSFDLASELKGEKLMLYRDPSGNVFPSDKWMAAGVFFGKLERILISKLTNQYSISTIEDDSSKQSMKRPAATKKAGQAKKKKGSYPYDVPDYAYPYDVPDYAYPYDVPDYA

SEQ ID NO: 4 - DNA, 4092 bp, synthetic construct
  misc_feature 1..4092: note = BhCas12b GGSGGS-ABE8-Xten20at K255 polynucleotide sequence
  misc_feature 1..6: note = Kozak sequence
  misc_feature 7..57: note = Sequence encoding N-terminal nuclear localization signal (NLS)
  misc_feature 58..822: note = Sequence encoding BhCas12b
  misc_feature 823..840: note = Sequence encoding a linker
  misc_feature 841..1338: note = Sequence encoding TadA*8
  misc_feature 1339..1398: note = Sequence encoding Xten20 linker
  misc_feature 1399..3954: note = Sequence encoding BhCas12b
  misc_feature 3955..4002: note = Sequence encoding C-terminal NLS
  misc_feature 4003..4008: note = Sequence encoding a GS linker
  misc_feature 4009..4089: note = Sequence encoding 3x hemagglutinin (HA) tag
  source 1..4092: mol_type = other DNA
gccaccatggccccaaagaagaagcggaaggtcggtatccacggagtcccagcagccgccaccagatccttcatcctgaagatcgagcccaacgaggaagtgaagaaaggcctctggaaaacccacgaggtgctgaaccacggaatcgcctactacatgaatatcctgaagctgatccggcaagaggccatctacgagcaccacgagcaggaccccaagaatcccaagaaggtgtccaaggccgagatccaggccgagctgtgggatttcgtgctgaagatgcagaagtgcaacagcttcacacacgaggtggacaaggacgaggtgttcaacatcctgagagagctgtacgaggaactggtgcccagcagcgtggaaaagaagggcgaagccaaccagctgagcaacaagtttctgtaccctctggtggaccccaacagccagtctggaaagggaacagccagcagcggcagaaagcccagatggtacaacctgaagattgccggcgatccctcctgggaagaagagaagaagaagtgggaagaagataagaaaaaggacccgctggccaagatcctgggcaagctggctgagtacggactgatccctctgttcatcccctacaccgacagcaacgagcccatcgtgaaagaaatcaagtggatggaaaagtcccggaaccagagcgtgcggcggctggataaggacatgttcattcaggccctggaacggttcctgagctgggagagctggaacctgaaagtgaaagaggaatacgagaaggtcgagaaagagtacaagaccctggaagagaggatcaaaggaggctctggaggaagctccgaagtcgagttttcccatgagtactggatgagacacgcattgactctcgcaaagagggctcgagatgaacgcgaggtgcccgtgggggcagtactcgtgctcaacaatcgcgtaatcggcgaaggttggaatagggcaatcggactccacgaccccactgcacatgcggaaatcatggcccttcgacagggagggcttgtgatgcagaattatcgactttatgatgcgacgctgtacgtcacgtttgaaccttgcgtaatgtgcgcgggagctatgattcactcccgcattggacgagttgtattcggtgttcgcaacgccaagacgggtgccgcaggttcactgatggacgtgctgcatcatccaggcatgaaccaccgggtagaaatcacagaaggcatattggcggacgaatgtgcggcgctgttgtgtcgtttttttcgcatgcccaggcgggtctttaacgcccagaaaaaagcacaatcctctactgacggctcttctggatctgaaacacctggcacaagcgagagcgccacccctgagagctctggcgaggacatccaggctctgaaggctctggaacagtatgagaaagagcggcaagaacagctgctgcgggacaccctgaacaccaacgagtaccggctgagcaagagaggccttagaggctggcgggaaatcatccagaaatggctgaaaatggacgagaacgagccctccgagaagtacctggaagtgttcaaggactaccagcggaagcaccctagagaggccggcgattacagcgtgtacgagttcctgtccaagaaagagaaccacttcatctggcggaatcaccctgagtacccctacctgtacgccaccttctgcgagatcgacaagaaaaagaaggacgccaagcagcaggccaccttcacactggccgatcctatcaatcaccctctgtgggtccgattcgaggaaagaagcggcagcaacctgaacaagtacagaatcctgaccgagcagctgcacaccgagaagctgaagaaaaagctgacagtgcagctggaccggctgatctaccctacagaatctggcggctgggaagagaagggcaaagtggacattgtgctgctgcccagccggcagttctacaaccagatcttcctggacatcgaggaaaagggcaagcacgccttcacctacaaggatgagagcatcaagttccctctgaagggcacactcggcggagccagagtgcagttcgacagagatcacctgagaagataccctcacaaggtggaaagcggcaacgtgggcagaatctacttcaacatgaccgtgaacatcgagcctacagagtccccagtgtccaagtctctgaagatccaccgggacgacttccccaaggtggtcaacttcaagcccaaagaactgaccgagtggatcaaggacagcaagggcaagaaactgaagtccggcatcgagtccctggaaatcggcctgagagtgatgagcatcgacctgggacagagacaggccgctgccgcctctattttcgaggtggtggatcagaagcccgacatcgaaggcaagctgtttttcccaatcaagggcaccgagctgtatgccgtgcacagagccagcttcaacatcaagctgcccggcgagacactggtcaagagcagagaagtgctgcggaaggccagagaggacaatctgaaactgatgaaccagaagctcaacttcctgcggaacgtgctgcacttccagcagttcgaggacatcaccgagagagagaagcgggtcaccaagtggatcagcagacaagagaacagcgacgtgcccctggtgtaccaggatgagctgatccagatccgcgagctgatgtacaagccttacaaggactgggtcgccttcctgaagcagctccacaagagactggaagtcgagatcggcaaagaagtgaagcactggcggaagtccctgagcgacggaagaaagggcctgtacggcatctccctgaagaacatcgacgagatcgatcggacccggaagttcctgctgagatggtccctgaggcctaccgaacctggcgaagtgcgtagactggaacccggccagagattcgccatcgaccagctgaatcacctgaacgccctgaaagaagatcggctgaagaagatggccaacaccatcatcatgcacgccctgggctactgctacgacgtgcggaagaagaaatggcaggctaagaaccccgcctgccagatcatcctgttcgaggatctgagcaactacaacccctacgaggaaaggtcccgcttcgagaacagcaagctcatgaagtggtccagacgcgagatccccagacaggttgcactgcagggcgagatctatggcctgcaagtgggagaagtgggcgctcagttcagcagcagattccacgccaagacaggcagccctggcatcagatgtagcgtcgtgaccaaagagaagctgcaggacaatcggttcttcaagaatctgcagagagagggcagactgaccctggacaaaatcgccgtgctgaaagagggcgatctgtacccagacaaaggcggcgagaagttcatcagcctgagcaaggatcggaagtgcgtgaccacacacgccgacatcaacgccgctcagaacctgcagaagcggttctggacaagaacccacggcttctacaaggtgtactgcaaggcctaccaggtggacggccagaccgtgtacatccctgagagcaaggaccagaagcagaagatcatcgaagagttcggcgagggctacttcattctgaaggacggggtgtacgaatgggtcaacgccggcaagctgaaaatcaagaagggcagctccaagcagagcagcagcgagctggtggatagcgacatcctgaaagacagcttcgacctggcctccgagctgaaaggcgaaaagctgatgctgtacagggaccccagcggcaatgtgttccccagcgacaaatggatggccgctggcgtgttcttcggaaagctggaacgcatcctgatcagcaagctgaccaaccagtactccatcagcaccatcgaggacgacagcagcaagcagtctatgaaaaggccggcggccacgaaaaaggccggccaggcaaaaaagaaaaagggatcctacccatacgatgttccagattacgcttatccctacgacgtgcctgattatgcatacccatatgatgtccccgactatgcctaa

SEQ ID NO: 5 - protein, 1361 aa, synthetic construct
  REGION 1..1361: note = BhCas12b GGSGGS-ABE8-Xten20at K255 polypeptide sequence
MAPKKKRKVGIHGVPAAATRSFILKIEPNEEVKKGLWKTHEVLNHGIAYYMNILKLIRQEAIYEHHEQDPKNPKKVSKAEIQAELWDFVLKMQKCNSFTHEVDKDEVFNILRELYEELVPSSVEKKGEANQLSNKFLYPLVDPNSQSGKGTASSGRKPRWYNLKIAGDPSWEEEKKKWEEDKKKDPLAKILGKLAEYGLIPLFIPYTDSNEPIVKEIKWMEKSRNQSVRRLDKDMFIQALERFLSWESWNLKVKEEYEKVEKEYKTLEERIKGGSGGSSEVEFSHEYWMRHALTLAKRARDEREVPVGAVLVLNNRVIGEGWNRAIGLHDPTAHAEIMALRQGGLVMQNYRLYDATLYVTFEPCVMCAGAMIHSRIGRVVFGVRNAKTGAAGSLMDVLHHPGMNHRVEITEGILADECAALLCRFFRMPRRVFNAQKKAQSSTDGSSGSETPGTSESATPESSGEDIQALKALEQYEKERQEQLLRDTLNTNEYRLSKRGLRGWREIIQKWLKMDENEPSEKYLEVFKDYQRKHPREAGDYSVYEFLSKKENHFIWRNHPEYPYLYATFCEIDKKKKDAKQQATFTLADPINHPLWVRFEERSGSNLNKYRILTEQLHTEKLKKKLTVQLDRLIYPTESGGWEEKGKVDIVLLPSRQFYNQIFLDIEEKGKHAFTYKDESIKFPLKGTLGGARVQFDRDHLRRYPHKVESGNVGRIYFNMTVNIEPTESPVSKSLKIHRDDFPKVVNFKPKELTEWIKDSKGKKLKSGIESLEIGLRVMSIDLGQRQAAAASIFEVVDQKPDIEGKLFFPIKGTELYAVHRASFNIKLPGETLVKSREVLRKAREDNLKLMNQKLNFLRNVLHFQQFEDITEREKRVTKWISRQENSDVPLVYQDELIQIRELMYKPYKDWVAFLKQLHKRLEVEIGKEVKHWRKSLSDGRKGLYGISLKNIDEIDRTRKFLLRWSLRPTEPGEVRRLEPGQRFAIDQLNHLNALKEDRLKKMANTIIMHALGYCYDVRKKKWQAKNPACQIILFEDLSNYNPYEERSRFENSKLMKWSRREIPRQVALQGEIYGLQVGEVGAQFSSRFHAKTGSPGIRCSVVTKEKLQDNRFFKNLQREGRLTLDKIAVLKEGDLYPDKGGEKFISLSKDRKCVTTHADINAAQNLQKRFWTRTHGFYKVYCKAYQVDGQTVYIPESKDQKQKIIEEFGEGYFILKDGVYEWVNAGKLKIKKGSSKQSSSELVDSDILKDSFDLASELKGEKLMLYRDPSGNVFPSDKWMAAGVFFGKLERILISKLTNQYSISTIEDDSSKQSMKRPAATKKAGQAKKKKGSYPYDVPDYAYPYDVPDYAYPYDVPDYA

SEQ ID NO: 6 - DNA, 4092 bp, synthetic construct
  misc_feature 1..4092: note = BhCas12b GGSGGS-ABE8-Xten20at D306 polynucleotide sequence
  misc_feature 1..6: note = Kozak sequence
  misc_feature 7..57: note = Sequence encoding N-terminal nuclear localization signal (NLS)
  misc_feature 58..975: note = Sequence encoding BhCas12b
  misc_feature 976..993: note = Sequence encoding a linker
  misc_feature 994..1491: note = Sequence encoding TadA*8
  misc_feature 1492..1551: note = Sequence encoding Xten20 linker
  misc_feature 1552..3954: note = Sequence encoding BhCas12b
  misc_feature 3955..4002: note = Sequence encoding C-terminal NLS
  misc_feature 4003..4008: note = Sequence encoding a GS linker
  misc_feature 4009..4089: note = Sequence encoding 3x hemagglutinin (HA) tag
  source 1..4092: mol_type = other DNA
gccaccatggccccaaagaagaagcggaaggtcggtatccacggagtcccagcagccgccaccagatccttcatcctgaagatcgagcccaacgaggaagtgaagaaaggcctctggaaaacccacgaggtgctgaaccacggaatcgcctactacatgaatatcctgaagctgatccggcaagaggccatctacgagcaccacgagcaggaccccaagaatcccaagaaggtgtccaaggccgagatccaggccgagctgtgggatttcgtgctgaagatgcagaagtgcaacagcttcacacacgaggtggacaaggacgaggtgttcaacatcctgagagagctgtacgaggaactggtgcccagcagcgtggaaaagaagggcgaagccaaccagctgagcaacaagtttctgtaccctctggtggaccccaacagccagtctggaaagggaacagccagcagcggcagaaagcccagatggtacaacctgaagattgccggcgatccctcctgggaagaagagaagaagaagtgggaagaagataagaaaaaggacccgctggccaagatcctgggcaagctggctgagtacggactgatccctctgttcatcccctacaccgacagcaacgagcccatcgtgaaagaaatcaagtggatggaaaagtcccggaaccagagcgtgcggcggctggataaggacatgttcattcaggccctggaacggttcctgagctgggagagctggaacctgaaagtgaaagaggaatacgagaaggtcgagaaagagtacaagaccctggaagagaggatcaaagaggacatccaggctctgaaggctctggaacagtatgagaaagagcggcaagaacagctgctgcgggacaccctgaacaccaacgagtaccggctgagcaagagaggccttagaggctggcgggaaatcatccagaaatggctgaaaatggacggaggctctggaggaagctccgaagtcgagttttcccatgagtactggatgagacacgcattgactctcgcaaagagggctcgagatgaacgcgaggtgcccgtgggggcagtactcgtgctcaacaatcgcgtaatcggcgaaggttggaatagggcaatcggactccacgaccccactgcacatgcggaaatcatggcccttcgacagggagggcttgtgatgcagaattatcgactttatgatgcgacgctgtacgtcacgtttgaaccttgcgtaatgtgcgcgggagctatgattcactcccgcattggacgagttgtattcggtgttcgcaacgccaagacgggtgccgcaggttcactgatggacgtgctgcatcatccaggcatgaaccaccgggtagaaatcacagaaggcatattggcggacgaatgtgcggcgctgttgtgtcgtttttttcgcatgcccaggcgggtctttaacgcccagaaaaaagcacaatcctctactgacggctcttctggatctgaaacacctggcacaagcgagagcgccacccctgagagctctggcgagaacgagccctccgagaagtacctggaagtgttcaaggactaccagcggaagcaccctagagaggccggcgattacagcgtgtacgagttcctgtccaagaaagagaaccacttcatctggcggaatcaccctgagtacccctacctgtacgccaccttctgcgagatcgacaagaaaaagaaggacgccaagcagcaggccaccttcacactggccgatcctatcaatcaccctctgtgggtccgattcgaggaaagaagcggcagcaacctgaacaagtacagaatcctgaccgagcagctgcacaccgagaagctgaagaaaaagctgacagtgcagctggaccggctgatctaccctacagaatctggcggctgggaagagaagggcaaagtggacattgtgctgctgcccagccggcagttctacaaccagatcttcctggacatcgaggaaaagggcaagcacgccttcacctacaaggatgagagcatcaagttccctctgaagggcacactcggcggagccagagtgcagttcgacagagatcacctgagaagataccctcacaaggtggaaagcggcaacgtgggcagaatctacttcaacatgaccgtgaacatcgagcctacagagtccccagtgtccaagtctctgaagatccaccgggacgacttccccaaggtggtcaacttcaagcccaaagaactgaccgagtggatcaaggacagcaagggcaagaaactgaagtccggcatcgagtccctggaaatcggcctgagagtgatgagcatcgacctgggacagagacaggccgctgccgcctctattttcgaggtggtggatcagaagcccgacatcgaaggcaagctgtttttcccaatcaagggcaccgagctgtatgccgtgcacagagccagcttcaacatcaagctgcccggcgagacactggtcaagagcagagaagtgctgcggaaggccagagaggacaatctgaaactgatgaaccagaagctcaacttcctgcggaacgtgctgcacttccagcagttcgaggacatcaccgagagagagaagcgggtcaccaagtggatcagcagacaagagaacagcgacgtgcccctggtgtaccaggatgagctgatccagatccgcgagctgatgtacaagccttacaaggactgggtcgccttcctgaagcagctccacaagagactggaagtcgagatcggcaaagaagtgaagcactggcggaagtccctgagcgacggaagaaagggcctgtacggcatctccctgaagaacatcgacgagatcgatcggacccggaagttcctgctgagatggtccctgaggcctaccgaacctggcgaagtgcgtagactggaacccggccagagattcgccatcgaccagctgaatcacctgaacgccctgaaagaagatcggctgaagaagatggccaacaccatcatcatgcacgccctgggctactgctacgacgtgcggaagaagaaatggcaggctaagaaccccgcctgccagatcatcctgttcgaggatctgagcaactacaacccctacgaggaaaggtcccgcttcgagaacagcaagctcatgaagtggtccagacgcgagatccccagacaggttgcactgcagggcgagatctatggcctgcaagtgggagaagtgggcgctcagttcagcagcagattccacgccaagacaggcagccctggcatcagatgtagcgtcgtgaccaaagagaagctgcaggacaatcggttcttcaagaatctgcagagagagggcagactgaccctggacaaaatcgccgtgctgaaagagggcgatctgtacccagacaaaggcggcgagaagttcatcagcctgagcaaggatcggaagtgcgtgaccacacacgccgacatcaacgccgctcagaacctgcagaagcggttctggacaagaacccacggcttctacaaggtgtactgcaaggcctaccaggtggacggccagaccgtgtacatccctgagagcaaggaccagaagcagaagatcatcgaagagttcggcgagggctacttcattctgaaggacggggtgtacgaatgggtcaacgccggcaagctgaaaatcaagaagggcagctccaagcagagcagcagcgagctggtggatagcgacatcctgaaagacagcttcgacctggcctccgagctgaaaggcgaaaagctgatgctgtacagggaccccagcggcaatgtgttccccagcgacaaatggatggccgctggcgtgttcttcggaaagctggaacgcatcctgatcagcaagctgaccaaccagtactccatcagcaccatcgaggacgacagcagcaagcagtctatgaaaaggccggcggccacgaaaaaggccggccaggcaaaaaagaaaaagggatcctacccatacgatgttccagattacgcttatccctacgacgtgcctgattatgcatacccatatgatgtccccgactatgcctaa

SEQ ID NO: 7 - protein, 1361 aa, synthetic construct
  REGION 1..1361: note = BhCas12b GGSGGS-ABE8-Xten20at D306 polypeptide sequence
MAPKKKRKVGIHGVPAAATRSFILKIEPNEEVKKGLWKTHEVLNHGIAYYMNILKLIRQEAIYEHHEQDPKNPKKVSKAEIQAELWDFVLKMQKCNSFTHEVDKDEVFNILRELYEELVPSSVEKKGEANQLSNKFLYPLVDPNSQSGKGTASSGRKPRWYNLKIAGDPSWEEEKKKWEEDKKKDPLAKILGKLAEYGLIPLFIPYTDSNEPIVKEIKWMEKSRNQSVRRLDKDMFIQALERFLSWESWNLKVKEEYEKVEKEYKTLEERIKEDIQALKALEQYEKERQEQLLRDTLNTNEYRLSKRGLRGWREIIQKWLKMDGGSGGSSEVEFSHEYWMRHALTLAKRARDEREVPVGAVLVLNNRVIGEGWNRAIGLHDPTAHAEIMALRQGGLVMQNYRLYDATLYVTFEPCVMCAGAMIHSRIGRVVFGVRNAKTGAAGSLMDVLHHPGMNHRVEITEGILADECAALLCRFFRMPRRVFNAQKKAQSSTDGSSGSETPGTSESATPESSGENEPSEKYLEVFKDYQRKHPREAGDYSVYEFLSKKENHFIWRNHPEYPYLYATFCEIDKKKKDAKQQATFTLADPINHPLWVRFEERSGSNLNKYRILTEQLHTEKLKKKLTVQLDRLIYPTESGGWEEKGKVDIVLLPSRQFYNQIFLDIEEKGKHAFTYKDESIKFPLKGTLGGARVQFDRDHLRRYPHKVESGNVGRIYFNMTVNIEPTESPVSKSLKIHRDDFPKVVNFKPKELTEWIKDSKGKKLKSGIESLEIGLRVMSIDLGQRQAAAASIFEVVDQKPDIEGKLFFPIKGTELYAVHRASFNIKLPGETLVKSREVLRKAREDNLKLMNQKLNFLRNVLHFQQFEDITEREKRVTKWISRQENSDVPLVYQDELIQIRELMYKPYKDWVAFLKQLHKRLEVEIGKEVKHWRKSLSDGRKGLYGISLKNIDEIDRTRKFLLRWSLRPTEPGEVRRLEPGQRFAIDQLNHLNALKEDRLKKMANTIIMHALGYCYDVRKKKWQAKNPACQIILFEDLSNYNPYEERSRFENSKLMKWSRREIPRQVALQGEIYGLQVGEVGAQFSSRFHAKTGSPGIRCSVVTKEKLQDNRFFKNLQREGRLTLDKIAVLKEGDLYPDKGGEKFISLSKDRKCVTTHADINAAQNLQKRFWTRTHGFYKVYCKAYQVDGQTVYIPESKDQKQKIIEEFGEGYFILKDGVYEWVNAGKLKIKKGSSKQSSSELVDSDILKDSFDLASELKGEKLMLYRDPSGNVFPSDKWMAAGVFFGKLERILISKLTNQYSISTIEDDSSKQSMKRPAATKKAGQAKKKKGSYPYDVPDYAYPYDVPDYAYPYDVPDYA

SEQ ID NO: 8 - DNA, 4092 bp, synthetic construct
  misc_feature 1..4092: note = BhCas12b GGSGGS-ABE8-Xten20at D980 polynucleotide sequence
  misc_feature 1..6: note = Kozak sequence
  misc_feature 7..57: note = Sequence encoding N-terminal nuclear localization signal (NLS)
  misc_feature 58..2997: note = Sequence encoding BhCas12b
  misc_feature 2998..3015: note = Sequence encoding a linker
  misc_feature 3016..3513: note = Sequence encoding TadA*8
  misc_feature 3514..3573: note = Sequence encoding Xten20 linker
  misc_feature 3574..3954: note = Sequence encoding BhCas12b
  misc_feature 3955..4002: note = Sequence encoding C-terminal NLS
  misc_feature 4003..4008: note = Sequence encoding a GS linker
  misc_feature 4009..4089: note = Sequence encoding 3x hemagglutinin (HA) tag
  source 1..4092: mol_type = other DNA
gccaccatggccccaaagaagaagcggaaggtcggtatccacggagtcccagcagccgccaccagatccttcatcctgaagatcgagcccaacgaggaagtgaagaaaggcctctggaaaacccacgaggtgctgaaccacggaatcgcctactacatgaatatcctgaagctgatccggcaagaggccatctacgagcaccacgagcaggaccccaagaatcccaagaaggtgtccaaggccgagatccaggccgagctgtgggatttcgtgctgaagatgcagaagtgcaacagcttcacacacgaggtggacaaggacgaggtgttcaacatcctgagagagctgtacgaggaactggtgcccagcagcgtggaaaagaagggcgaagccaaccagctgagcaacaagtttctgtaccctctggtggaccccaacagccagtctggaaagggaacagccagcagcggcagaaagcccagatggtacaacctgaagattgccggcgatccctcctgggaagaagagaagaagaagtgggaagaagataagaaaaaggacccgctggccaagatcctgggcaagctggctgagtacggactgatccctctgttcatcccctacaccgacagcaacgagcccatcgtgaaagaaatcaagtggatggaaaagtcccggaaccagagcgtgcggcggctggataaggacatgttcattcaggccctggaacggttcctgagctgggagagctggaacctgaaagtgaaagaggaatacgagaaggtcgagaaagagtacaagaccctggaagagaggatcaaagaggacatccaggctctgaaggctctggaacagtatgagaaagagcggcaagaacagctgctgcgggacaccctgaacaccaacgagtaccggctgagcaagagaggccttagaggctggcgggaaatcatccagaaatggctgaaaatggacgagaacgagccctccgagaagtacctggaagtgttcaaggactaccagcggaagcaccctagagaggccggcgattacagcgtgtacgagttcctgtccaagaaagagaaccacttcatctggcggaatcaccctgagtacccctacctgtacgccaccttctgcgagatcgacaagaaaaagaaggacgccaagcagcaggccaccttcacactggccgatcctatcaatcaccctctgtgggtccgattcgaggaaagaagcggcagcaacctgaacaagtacagaatcctgaccgagcagctgcacaccgagaagctgaagaaaaagctgacagtgcagctggaccggctgatctaccctacagaatctggcggctgggaagagaagggcaaagtggacattgtgctgctgcccagccggcagttctacaaccagatcttcctggacatcgaggaaaagggcaagcacgccttcacctacaaggatgagagcatcaagttccctctgaagggcacactcggcggagccagagtgcagttcgacagagatcacctgagaagataccctcacaaggtggaaagcggcaacgtgggcagaatctacttcaacatgaccgtgaacatcgagcctacagagtccccagtgtccaagtctctgaagatccaccgggacgacttccccaaggtggtcaacttcaagcccaaagaactgaccgagtggatcaaggacagcaagggcaagaaactgaagtccggcatcgagtccctggaaatcggcctgagagtgatgagcatcgacctgggacagagacaggccgctgccgcctctattttcgaggtggtggatcagaagcccgacatcgaaggcaagctgtttttcccaatcaagggcaccgagctgtatgccgtgcacagagccagcttcaacatcaagctgcccggcgagacactggtcaagagcagagaagtgctgcggaaggccagagaggacaatctgaaactgatgaaccagaagctcaacttcctgcggaacgtgctgcacttccagcagttcgaggacatcaccgagagagagaagcgggtcaccaagtggatcagcagacaagagaacagcgacgtgcccctggtgtaccaggatgagctgatccagatccgcgagctgatgtacaagccttacaaggactgggtcgccttcctgaagcagctccacaagagactggaagtcgagatcggcaaagaagtgaagcactggcggaagtccctgagcgacggaagaaagggcctgtacggcatctccctgaagaacatcgacgagatcgatcggacccggaagttcctgctgagatggtccctgaggcctaccgaacctggcgaagtgcgtagactggaacccggccagagattcgccatcgaccagctgaatcacctgaacgccctgaaagaagatcggctgaagaagatggccaacaccatcatcatgcacgccctgggctactgctacgacgtgcggaagaagaaatggcaggctaagaaccccgcctgccagatcatcctgttcgaggatctgagcaactacaacccctacgaggaaaggtcccgcttcgagaacagcaagctcatgaagtggtccagacgcgagatccccagacaggttgcactgcagggcgagatctatggcctgcaagtgggagaagtgggcgctcagttcagcagcagattccacgccaagacaggcagccctggcatcagatgtagcgtcgtgaccaaagagaagctgcaggacaatcggttcttcaagaatctgcagagagagggcagactgaccctggacaaaatcgccgtgctgaaagagggcgatctgtacccagacaaaggcggcgagaagttcatcagcctgagcaaggatcggaagtgcgtgaccacacacgccgacatcaacgccgctcagaacctgcagaagcggttctggacaagaacccacggcttctacaaggtgtactgcaaggcctaccaggtggacggaggctctggaggaagctccgaagtcgagttttcccatgagtactggatgagacacgcattgactctcgcaaagagggctcgagatgaacgcgaggtgcccgtgggggcagtactcgtgctcaacaatcgcgtaatcggcgaaggttggaatagggcaatcggactccacgaccccactgcacatgcggaaatcatggcccttcgacagggagggcttgtgatgcagaattatcgactttatgatgcgacgctgtacgtcacgtttgaaccttgcgtaatgtgcgcgggagctatgattcactcccgcattggacgagttgtattcggtgttcgcaacgccaagacgggtgccgcaggttcactgatggacgtgctgcatcatccaggcatgaaccaccgggtagaaatcacagaaggcatattggcggacgaatgtgcggcgctgttgtgtcgtttttttcgcatgcccaggcgggtctttaacgcccagaaaaaagcacaatcctctactgacggctcttctggatctgaaacacctggcacaagcgagagcgccacccctgagagctctggcggccagaccgtgtacatccctgagagcaaggaccagaagcagaagatcatcgaagagttcggcgagggctacttcattctgaaggacggggtgtacgaatgggtcaacgccggcaagctgaaaatcaagaagggcagctccaagcagagcagcagcgagctggtggatagcgacatcctgaaagacagcttcgacctggcctccgagctgaaaggcgaaaagctgatgctgtacagggaccccagcggcaatgtgttccccagcgacaaatggatggccgctggcgtgttcttcggaaagctggaacgcatcctgatcagcaagctgaccaaccagtactccatcagcaccatcgaggacgacagcagcaagcagtctatgaaaaggccggcggccacgaaaaaggccggccaggcaaaaaagaaaaagggatcctacccatacgatgttccagattacgcttatccctacgacgtgcctgattatgcatacccatatgatgtccccgactatgcctaa

SEQ ID NO: 9 - protein, 1361 aa, synthetic construct
  REGION 1..1361: note = BhCas12b GGSGGS-ABE8-Xten20at D980 polypeptide sequence
MAPKKKRKVGIHGVPAAATRSFILKIEPNEEVKKGLWKTHEVLNHGIAYYMNILKLIRQEAIYEHHEQDPKNPKKVSKAEIQAELWDFVLKMQKCNSFTHEVDKDEVFNILRELYEELVPSSVEKKGEANQLSNKFLYPLVDPNSQSGKGTASSGRKPRWYNLKIAGDPSWEEEKKKWEEDKKKDPLAKILGKLAEYGLIPLFIPYTDSNEPIVKEIKWMEKSRNQSVRRLDKDMFIQALERFLSWESWNLKVKEEYEKVEKEYKTLEERIKEDIQALKALEQYEKERQEQLLRDTLNTNEYRLSKRGLRGWREIIQKWLKMDENEPSEKYLEVFKDYQRKHPREAGDYSVYEFLSKKENHFIWRNHPEYPYLYATFCEIDKKKKDAKQQATFTLADPINHPLWVRFEERSGSNLNKYRILTEQLHTEKLKKKLTVQLDRLIYPTESGGWEEKGKVDIVLLPSRQFYNQIFLDIEEKGKHAFTYKDESIKFPLKGTLGGARVQFDRDHLRRYPHKVESGNVGRIYFNMTVNIEPTESPVSKSLKIHRDDFPKVVNFKPKELTEWIKDSKGKKLKSGIESLEIGLRVMSIDLGQRQAAAASIFEVVDQKPDIEGKLFFPIKGTELYAVHRASFNIKLPGETLVKSREVLRKAREDNLKLMNQKLNFLRNVLHFQQFEDITEREKRVTKWISRQENSDVPLVYQDELIQIRELMYKPYKDWVAFLKQLHKRLEVEIGKEVKHWRKSLSDGRKGLYGISLKNIDEIDRTRKFLLRWSLRPTEPGEVRRLEPGQRFAIDQLNHLNALKEDRLKKMANTIIMHALGYCYDVRKKKWQAKNPACQIILFEDLSNYNPYEERSRFENSKLMKWSRREIPRQVALQGEIYGLQVGEVGAQFSSRFHAKTGSPGIRCSVVTKEKLQDNRFFKNLQREGRLTLDKIAVLKEGDLYPDKGGEKFISLSKDRKCVTTHADINAAQNLQKRFWTRTHGFYKVYCKAYQVDGGSGGSSEVEFSHEYWMRHALTLAKRARDEREVPVGAVLVLNNRVIGEGWNRAIGLHDPTAHAEIMALRQGGLVMQNYRLYDATLYVTFEPCVMCAGAMIHSRIGRVVFGVRNAKTGAAGSLMDVLHHPGMNHRVEITEGILADECAALLCRFFRMPRRVFNAQKKAQSSTDGSSGSETPGTSESATPESSGGQTVYIPESKDQKQKIIEEFGEGYFILKDGVYEWVNAGKLKIKKGSSKQSSSELVDSDILKDSFDLASELKGEKLMLYRDPSGNVFPSDKWMAAGVFFGKLERILISKLTNQYSISTIEDDSSKQSMKRPAATKKAGQAKKKKGSYPYDVPDYAYPYDVPDYAYPYDVPDYA

SEQ ID NO: 10 - DNA, 4092 bp, synthetic construct
  misc_feature 1..4092: note = BhCas12b GGSGGS-ABE8-Xten20at K1019 polynucleotide sequence
  misc_feature 1..6: note = Kozak sequence
  misc_feature 7..57: note = Sequence encoding N-terminal nuclear localization signal (NLS)
  misc_feature 58..3114: note = Sequence encoding BhCas12b
  misc_feature 3115..3132: note = Sequence encoding a linker
  misc_feature 3133..3630: note = Sequence encoding TadA*8
  misc_feature 3631..3690: note = Sequence encoding Xten20 linker
  misc_feature 3691..3954: note = Sequence encoding BhCas12b
  misc_feature 3955..4002: note = Sequence encoding C-terminal NLS
  misc_feature 4003..4008: note = Sequence encoding GS linker
  misc_feature 4009..4089: note = Sequence encoding 3x hemagglutinin (HA) tag
  source 1..4092: mol_type = other DNA
gccaccatggccccaaagaagaagcggaaggtcggtatccacggagtcccagcagccgccaccagatccttcatcctgaagatcgagcccaacgaggaagtgaagaaaggcctctggaaaacccacgaggtgctgaaccacggaatcgcctactacatgaatatcctgaagctgatccggcaagaggccatctacgagcaccacgagcaggaccccaagaatcccaagaaggtgtccaaggccgagatccaggccgagctgtgggatttcgtgctgaagatgcagaagtgcaacagcttcacacacgaggtggacaaggacgaggtgttcaacatcctgagagagctgtacgaggaactggtgcccagcagcgtggaaaagaagggcgaagccaaccagctgagcaacaagtttctgtaccctctggtggaccccaacagccagtctggaaagggaacagccagcagcggcagaaagcccagatggtacaacctgaagattgccggcgatccctcctgggaagaagagaagaagaagtgggaagaagataagaaaaaggacccgctggccaagatcctgggcaagctggctgagtacggactgatccctctgttcatcccctacaccgacagcaacgagcccatcgtgaaagaaatcaagtggatggaaaagtcccggaaccagagcgtgcggcggctggataaggacatgttcattcaggccctggaacggttcctgagctgggagagctggaacctgaaagtgaaagaggaatacgagaaggtcgagaaagagtacaagaccctggaagagaggatcaaagaggacatccaggctctgaaggctctggaacagtatgagaaagagcggcaagaacagctgctgcgggacaccctgaacaccaacgagtaccggctgagcaagagaggccttagaggctggcgggaaatcatccagaaatggctgaaaatggacgagaacgagccctccgagaagtacctggaagtgttcaaggactaccagcggaagcaccctagagaggccggcgattacagcgtgtacgagttcctgtccaagaaagagaaccacttcatctggcggaatcaccctgagtacccctacctgtacgccaccttctgcgagatcgacaagaaaaagaaggacgccaagcagcaggccaccttcacactggccgatcctatcaatcaccctctgtgggtccgattcgaggaaagaagcggcagcaacctgaacaagtacagaatcctgaccgagcagctgcacaccgagaagctgaagaaaaagctgacagtgcagctggaccggctgatctaccctacagaatctggcggctgggaagagaagggcaaagtggacattgtgctgctgcccagccggcagttctacaaccagatcttcctggacatcgaggaaaagggcaagcacgccttcacctacaaggatgagagcatcaagttccctctgaagggcacactcggcggagccagagtgcagttcgacagagatcacctgagaagataccctcacaaggtggaaagcggcaacgtgggcagaatctacttcaacatgaccgtgaacatcgagcctacagagtccccagtgtccaagtctctgaagatccaccgggacgacttccccaaggtggtcaacttcaagcccaaagaactgaccgagtggatcaaggacagcaagggcaagaaactgaagtccggcatcgagtccctggaaatcggcctgagagtgatgagcatcgacctgggacagagacaggccgctgccgcctctattttcgaggtggtggatcagaagcccgacatcgaaggcaagctgtttttcccaatcaagggcaccgagctgtatgccgtgcacagagccagcttcaacatcaagctgcccggcgagacactggtcaagagcagagaagtgctgcggaaggccagagaggacaatctgaaactgatgaaccagaagctcaacttcctgcggaacgtgctgcacttccagcagttcgaggacatcaccgagagagagaagcgggtcaccaagtggatcagcagacaagagaacagcgacgtgcccctggtgtaccaggatgagctgatccagatccgcgagctgatgtacaagccttacaaggactgggtcgccttcctgaagcagctccacaagagactggaagtcgagatcggcaaagaagtgaagcactggcggaagtccctgagcgacggaagaaagggcctgtacggcatctccctgaagaacatcgacgagatcgatcggacccggaagttcctgctgagatggtccctgaggcctaccgaacctggcgaagtgcgtagactggaacccggccagagattcgccatcgaccagctgaatcacctgaacgccctgaaagaagatcggctgaagaagatggccaacaccatcatcatgcacgccctgggctactgctacgacgtgcggaagaagaaatggcaggctaagaaccccgcctgccagatcatcctgttcgaggatctgagcaactacaacccctacgaggaaaggtcccgcttcgagaacagcaagctcatgaagtggtccagacgcgagatccccagacaggttgcactgcagggcgagatctatggcctgcaagtgggagaagtgggcgctcagttcagcagcagattccacgccaagacaggcagccctggcatcagatgtagcgtcgtgaccaaagagaagctgcaggacaatcggttcttcaagaatctgcagagagagggcagactgaccctggacaaaatcgccgtgctgaaagagggcgatctgtacccagacaaaggcggcgagaagttcatcagcctgagcaaggatcggaagtgcgtgaccacacacgccgacatcaacgccgctcagaacctgcagaagcggttctggacaagaacccacggcttctacaaggtgtactgcaaggcctaccaggtggacggccagaccgtgtacatccctgagagcaaggaccagaagcagaagatcatcgaagagttcggcgagggctacttcattctgaaggacggggtgtacgaatgggtcaacgccggcaagggaggctctggaggaagctccgaagtcgagttttcccatgagtactggatgagacacgcattgactctcgcaaagagggctcgagatgaacgcgaggtgcccgtgggggcagtactcgtgctcaacaatcgcgtaatcggcgaaggttggaatagggcaatcggactccacgaccccactgcacatgcggaaatcatggcccttcgacagggagggcttgtgatgcagaattatcgactttatgatgcgacgctgtacgtcacgtttgaaccttgcgtaatgtgcgcgggagctatgattcactcccgcattggacgagttgtattcggtgttcgcaacgccaagacgggtgccgcaggttcactgatggacgtgctgcatcatccaggcatgaaccaccgggtagaaatcacagaaggcatattggcggacgaatgtgcggcgctgttgtgtcgtttttttcgcatgcccaggcgggtctttaacgcccagaaaaaagcacaatcctctactgacggctcttctggatctgaaacacctggcacaagcgagagcgccacccctgagagctctggcctgaaaatcaagaagggcagctccaagcagagcagcagcgagctggtggatagcgacatcctgaaagacagcttcgacctggcctccgagctgaaaggcgaaaagctgatgctgtacagggaccccagcggcaatgtgttccccagcgacaaatggatggccgctggcgtgttcttcggaaagctggaacgcatcctgatcagcaagctgaccaaccagtactccatcagcaccatcgaggacgacagcagcaagcagtctatgaaaaggccggcggccacgaaaaaggccggccaggcaaaaaagaaaaagggatcctacccatacgatgttccagattacgcttatccctacgacgtgcctgattatgcatacccatatgatgtccccgactatgcctaa

SEQ ID NO: 11 - protein, 1361 aa, synthetic construct
  REGION 1..1361: note = BhCas12b GGSGGS-ABE8-Xten20at K1019 polypeptide sequence
MAPKKKRKVGIHGVPAAATRSFILKIEPNEEVKKGLWKTHEVLNHGIAYYMNILKLIRQEAIYEHHEQDPKNPKKVSKAEIQAELWDFVLKMQKCNSFTHEVDKDEVFNILRELYEELVPSSVEKKGEANQLSNKFLYPLVDPNSQSGKGTASSGRKPRWYNLKIAGDPSWEEEKKKWEEDKKKDPLAKILGKLAEYGLIPLFIPYTDSNEPIVKEIKWMEKSRNQSVRRLDKDMFIQALERFLSWESWNLKVKEEYEKVEKEYKTLEERIKEDIQALKALEQYEKERQEQLLRDTLNTNEYRLSKRGLRGWREIIQKWLKMDENEPSEKYLEVFKDYQRKHPREAGDYSVYEFLSKKENHFIWRNHPEYPYLYATFCEIDKKKKDAKQQATFTLADPINHPLWVRFEERSGSNLNKYRILTEQLHTEKLKKKLTVQLDRLIYPTESGGWEEKGKVDIVLLPSRQFYNQIFLDIEEKGKHAFTYKDESIKFPLKGTLGGARVQFDRDHLRRYPHKVESGNVGRIYFNMTVNIEPTESPVSKSLKIHRDDFPKVVNFKPKELTEWIKDSKGKKLKSGIESLEIGLRVMSIDLGQRQAAAASIFEVVDQKPDIEGKLFFPIKGTELYAVHRASFNIKLPGETLVKSREVLRKAREDNLKLMNQKLNFLRNVLHFQQFEDITEREKRVTKWISRQENSDVPLVYQDELIQIRELMYKPYKDWVAFLKQLHKRLEVEIGKEVKHWRKSLSDGRKGLYGISLKNIDEIDRTRKFLLRWSLRPTEPGEVRRLEPGQRFAIDQLNHLNALKEDRLKKMANTIIMHALGYCYDVRKKKWQAKNPACQIILFEDLSNYNPYEERSRFENSKLMKWSRREIPRQVALQGEIYGLQVGEVGAQFSSRFHAKTGSPGIRCSVVTKEKLQDNRFFKNLQREGRLTLDKIAVLKEGDLYPDKGGEKFISLSKDRKCVTTHADINAAQNLQKRFWTRTHGFYKVYCKAYQVDGQTVYIPESKDQKQKIIEEFGEGYFILKDGVYEWVNAGKGGSGGSSEVEFSHEYWMRHALTLAKRARDEREVPVGAVLVLNNRVIGEGWNRAIGLHDPTAHAEIMALRQGGLVMQNYRLYDATLYVTFEPCVMCAGAMIHSRIGRVVFGVRNAKTGAAGSLMDVLHHPGMNHRVEITEGILADECAALLCRFFRMPRRVFNAQKKAQSSTDGSSGSETPGTSESATPESSGLKIKKGSSKQSSSELVDSDILKDSFDLASELKGEKLMLYRDPSGNVFPSDKWMAAGVFFGKLERILISKLTNQYSISTIEDDSSKQSMKRPAATKKAGQAKKKKGSYPYDVPDYAYPYDVPDYAYPYDVPDYA

SEQ ID NO: 12 - protein, 208 aa, Petromyzon marinus
  REGION 1..208: note = MISC_FEATURE - tr|A5H718|A5H718_PETMA Cytosine deaminase OS=Petromyzon marinusOX=7757 PE=2 SV=1 amino acid sequence; PmCDA1 polypeptide sequence
MTDAEYVRIHEKLDIYTFKKQFFNNKKSVSHRCYVLFELKRRGERRACFWGYAVNKPQSGTERGIHAEIFSIRKVEEYLRDNPGQFTINWYSSWSPCADCAEKILEWYNQELRGNGHTLKIWACKLYYEKNARNQIGLWNLRDNGVGLNVMVSEHYQCCRKIFIQSSHNQLNENRWLEKTLKRAEKRRSELSIMIQVKILHTTKSPAV

SEQ ID NO: 13 - DNA, 766 bp, Petromyzon marinus
  misc_feature 1..766: note = EF094822.1 Petromyzon marinus isolate PmCDA.21 cytosine deaminase mRNA, complete cds; PmCDA1 polynucleotide sequence
  source 1..766: mol_type = genomic DNA
tgacacgacacagccgtgtatatgaggaagggtagctggatggggggggggggaatacgttcagagaggacattagcgagcgtcttgttggtggccttgagtctagacacctgcagacatgaccgacgctgagtacgtgagaatccatgagaagttggacatctacacgtttaagaaacagtttttcaacaacaaaaaatccgtgtcgcatagatgctacgttctctttgaattaaaacgacggggtgaacgtagagcgtgtttttggggctatgctgtgaataaaccacagagcgggacagaacgtggaattcacgccgaaatctttagcattagaaaagtcgaagaatacctgcgcgacaaccccggacaattcacgataaattggtactcatcctggagtccttgtgcagattgcgctgaaaagatcttagaatggtataaccaggagctgcgggggaacggccacactttgaaaatctgggcttgcaaactctattacgagaaaaatgcgaggaatcaaattgggctgtggaacctcagagataacggggttgggttgaatgtaatggtaagtgaacactaccaatgttgcaggaaaatattcatccaatcgtcgcacaatcaattgaatgagaatagatggcttgagaagactttgaagcgagctgaaaaacgacggagcgagttgtccattatgattcaggtaaaaatactccacaccactaagagtcctgctgtttaagaggctatgcggatggttttc

SEQ ID NO: 14 - protein, 145 aa, Homo sapiens
  REGION 1..145: note = MISC_FEATURE - tr|Q6QJ80|Q6QJ80_HUMAN Activation-induced cytidine deaminase OS=Homo sapiens; OX = 9606 GN=AICDA PE=2 SV=1; AID polypeptide sequence
MDSLLMNRRKFLYQFKNVRWAKGRRETYLCYVVKRRDSATSFSLDFGYLRNKNGCHVELLFLRYISDWDLDPGRCYRVTWFTSWSPCYDCARHVADFLRGNPNLSLRIFTARLYFCEDRKAEPEGLRRLHRAGVQIAIMTFKAPV

SEQ ID NO: 15 - DNA, 10681 bp, Homo sapiens
  misc_feature 1..10681: note = NG_011588.1:5001-15681 Homo sapiens activation induced cytidine deaminase (AICDA), RefSeqGene (LRG_17) on chromosome 12; nucleic acid sequence of the CDS of human AID; polynucleotide sequence
  source 1..10681: mol_type = genomic DNA
agagaaccatcattaattgaagtgagatttttctggcctgagacttgcagggaggcaagaagacactctggacaccactatggacaggtaaagaggcagtcttctcgtgggtgattgcactggccttcctctcagagcaaatctgagtaatgagactggtagctatccctttctctcatgtaactgtctgactgataagatcagcttgatcaatatgcatatatattttttgatctgtctccttttcttctattcagatcttatacgctgtcagcccaattctttctgtttcagacttctcttgatttccctctttttcatgtggcaaaagaagtagtgcgtacaatgtactgattcgtcctgagatttgtaccatggttgaaactaatttatggtaataatattaacatagcaaatctttagagactcaaatcatgaaaaggtaatagcagtactgtactaaaaacggtagtgctaattttcgtaataattttgtaaatattcaacagtaaaacaacttgaagacacactttcctagggaggcgttactgaaataatttagctatagtaagaaaatttgtaattttagaaatgccaagcattctaaattaattgcttgaaagtcactatgattgtgtccattataaggagacaaattcattcaagcaagttatttaatgttaaaggcccaattgttaggcagttaatggcacttttactattaactaatctttccatttgttcagacgtagcttaacttacctcttaggtgtgaatttggttaaggtcctcataatgtctttatgtgcagtttttgataggttattgtcatagaacttattctattcctacatttatgattactatggatgtatgagaataacacctaatccttatactttacctcaatttaactcctttataaagaacttacattacagaataaagattttttaaaaatatatttttttgtagagacagggtcttagcccagccgaggctggtctctaagtcctggcccaagcgatcctcctgcctgggcctcctaaagtgctggaattatagacatgagccatcacatccaatatacagaataaagatttttaatggaggatttaatgttcttcagaaaattttcttgaggtcagacaatgtcaaatgtctcctcagtttacactgagattttgaaaacaagtctgagctataggtccttgtgaagggtccattggaaatacttgttcaaagtaaaatggaaagcaaaggtaaaatcagcagttgaaattcagagaaagacagaaaaggagaaaagatgaaattcaacaggacagaagggaaatatattatcattaaggaggacagtatctgtagagctcattagtgatggcaaaatgacttggtcaggattatttttaacccgcttgtttctggtttgcacggctggggatgcagctagggttctgcctcagggagcacagctgtccagagcagctgtcagcctgcaagcctgaaacactccctcggtaaagtccttcctactcaggacagaaatgacgagaacagggagctggaaacaggcccctaaccagagaagggaagtaatggatcaacaaagttaactagcaggtcaggatcacgcaattcatttcactctgactggtaacatgtgacagaaacagtgtaggcttattgtattttcatgtagagtaggacccaaaaatccacccaaagtcctttatctatgccacatccttcttatctatacttccaggacactttttcttccttatgataaggctctctctctctccacacacacacacacacacacacacacacacacacacacacacacaaacacacaccccgccaaccaaggtgcatgtaaaaagatgtagattcctctgcctttctcatctacacagcccaggagggtaagttaatataagagggatttattggtaagagatgatgcttaatctgtttaacactgggcctcaaagagagaatttcttttcttctgtacttattaagcacctattatgtgttgagcttatatatacaaagggttattatatgctaatatagtaatagtaatggtggttggtactatggtaattaccataaaaattattatccttttaaaataaagctaattattattggatcttttttagtattcattttatgttttttatgtttttgattttttaaaagacaatctcaccctgttacccaggctggagtgcagtggtgcaatcatagctttctgcagtcttgaactcctgggctcaagcaatcctcctgccttggcctcccaaagtgttgggatacagtcatgagccactgcatctggcctaggatccatttagattaaaatatgcattttaaattttaaaataatatggctaatttttaccttatgtaatgtgtatactggcaataaatctagtttgctgcctaaagtttaaagtgctttccagtaagcttcatgtacgtgaggggagacatttaaagtgaaacagacagccaggtgtggtggctcacgcctgtaatcccagcactctgggaggctgaggtgggtggatcgcttgagccctggagttcaagaccagcctgagcaacatggcaaaacgctgtttctataacaaaaattagccgggcatggtggcatgtgcctgtggtcccagctactagggggctgaggcaggagaatcgttggagcccaggaggtcaaggctgcactgagcagtgcttgcgccactgcactccagcctgggtgacaggaccagaccttgcctcaaaaaaataagaagaaaaattaaaaataaatggaaacaactacaaagagctgttgtcctagatgagctacttagttaggctgatattttggtatttaacttttaaagtcagggtctgtcacctgcactacattattaaaatatcaattctcaatgtatatccacacaaagactggtacgtgaatgttcatagtacctttattcacaaaaccccaaagtagagactatccaaatatccatcaacaagtgaacaaataaacaaaatgtgctatatccatgcaatggaataccaccctgcagtacaaagaagctacttggggatgaatcccaaagtcatgacgctaaatgaaagagtcagacatgaaggaggagataatgtatgccatacgaaattctagaaaatgaaagtaacttatagttacagaaagcaaatcagggcaggcatagaggctcacacctgtaatcccagcactttgagaggccacgtgggaagattgctagaactcaggagttcaagaccagcctgggcaacacagtgaaactccattctccacaaaaatgggaaaaaaagaaagcaaatcagtggttgtcctgtggggaggggaaggactgcaaagagggaagaagctctggtggggtgagggtggtgattcaggttctgtatcctgactgtggtagcagtttggggtgtttacatccaaaaatattcgtagaattatgcatcttaaatgggtggagtttactgtatgtaaattatacctcaatgtaagaaaaaataatgtgtaagaaaactttcaattctcttgccagcaaacgttattcaaattcctgagccctttacttcgcaaattctctgcacttctgccccgtaccattaggtgacagcactagctccacaaattggataaatgcatttctggaaaagactagggacaaaatccaggcatcacttgtgctttcatatcaaccatgctgtacagcttgtgttgctgtctgcagctgcaatggggactcttgatttctttaaggaaacttgggttaccagagtatttccacaaatgctattcaaattagtgcttatgatatgcaagacactgtgctaggagccagaaaacaaagaggaggagaaatcagtcattatgtgggaacaacatagcaagatatttagatcattttgactagttaaaaaagcagcagagtacaaaatcacacatgcaatcagtataatccaaatcatgtaaatatgtgcctgtagaaagactagaggaataaacacaagaatcttaacagtcattgtcattagacactaagtctaattattattattagacactatgatatttgagatttaaaaaatctttaatattttaaaatttagagctcttctatttttccatagtattcaagtttgacaatgatcaagtattactctttctttttttttttttttttttttttttgagatggagttttggtcttgttgcccatgctggagtggaatggcatgaccatagctcactgcaacctccacctcctgggttcaagcaaagctgtcgcctcagcctcccgggtagatgggattacaggcgcccaccaccacactcggctaatgtttgtatttttagtagagatggggtttcaccatgttggccaggctggtctcaaactcctgacctcagaggatccacctgcctcagcctcccaaagtgctgggattacagatgtaggccactgcgcccggccaagtattgctcttatacattaaaaaacaggtgtgagccactgcgcccagccaggtattgctcttatacattaaaaaataggccggtgcagtggctcacgcctgtaatcccagcactttgggaagccaaggcgggcagaacacccgaggtcaggagtccaaggccagcctggccaagatggtgaaaccccgtctctattaaaaatacaaacattacctgggcatgatggtgggcgcctgtaatcccagctactcaggaggctgaggcaggaggatccgcggagcctggcagatctgcctgagcctgggaggttgaggctacagtaagccaagatcatgccagtatacttcagcctgggcgacaaagtgagaccgtaacaaaaaaaaaaaaatttaaaaaaagaaatttagatcaagatccaactgtaaaaagtggcctaaacaccacattaaagagtttggagtttattctgcaggcagaagagaaccatcagggggtcttcagcatgggaatggcatggtgcacctggtttttgtgagatcatggtggtgacagtgtggggaatgttattttggagggactggaggcagacagaccggttaaaaggccagcacaacagataaggaggaagaagatgagggcttggaccgaagcagagaagagcaaacagggaaggtacaaattcaagaaatattggggggtttgaatcaacacatttagatgattaattaaatatgaggactgaggaataagaaatgagtcaaggatggttccaggctgctaggctgcttacctgaggtggcaaagtcgggaggagtggcagtttaggacagggggcagttgaggaatattgttttgatcattttgagtttgaggtacaagttggacacttaggtaaagactggaggggaaatctgaatatacaattatgggactgaggaacaagtttattttattttttgtttcgttttcttgttgaagaacaaatttaattgtaatcccaagtcatcagcatctagaagacagtggcaggaggtgactgtcttgtgggtaagggtttggggtccttgatgagtatctctcaattggccttaaatataagcaggaaaaggagtttatgatggattccaggctcagcagggctcaggagggctcaggcagccagcagaggaagtcagagcatcttctttggtttagcccaagtaatgacttccttaaaaagctgaaggaaaatccagagtgaccagattataaactgtactcttgcattttctctccctcctctcacccacagcctcttgatgaaccggaggaagtttctttaccaattcaaaaatgtccgctgggctaagggtcggcgtgagacctacctgtgctacgtagtgaagaggcgtgacagtgctacatccttttcactggactttggttatcttcgcaataaggtatcaattaaagtcggctttgcaagcagtttaatggtcaactgtgagtgcttttagagccacctgctgatggtattacttccatccttttttggcatttgtgtctctatcacattcctcaaatccttttttttatttctttttccatgtccatgcacccatattagacatggcccaaaatatgtgatttaattcctccccagtaatgctgggcaccctaataccactccttccttcagtgccaagaacaactgctcccaaactgtttaccagctttcctcagcatctgaattgcctttgagattaattaagctaaaagcatttttatatgggagaatattatcagcttgtccaagcaaaaattttaaatgtgaaaaacaaattgtgtcttaagcatttttgaaaattaaggaagaagaatttgggaaaaaattaacggtggctcaattctgtcttccaaatgatttcttttccctcctactcacatgggtcgtaggccagtgaatacattcaacatggtgatccccagaaaactcagagaagcctcggctgatgattaattaaattgatctttcggctacccgagagaattacatttccaagagacttcttcaccaaaatccagatgggtttacataaacttctgcccacgggtatctcctctctcctaacacgctgtgacgtctgggcttggtggaatctcagggaagcatccgtggggtggaaggtcatcgtctggctcgttgtttgatggttatattaccatgcaattttctttgcctacatttgtattgaatacatcccaatctccttcctattcggtgacatgacacattctatttcagaaggctttgattttatcaagcactttcatttacttctcatggcagtgcctattacttctcttacaatacccatctgtctgctttaccaaaatctatttccccttttcagatcctcccaaatggtcctcataaactgtcctgcctccacctagtggtccaggtatatttccacaatgttacatcaacaggcacttctagccattttccttctcaaaaggtgcaaaaagcaacttcataaacacaaattaaatcttcggtgaggtagtgtgatgctgcttcctcccaactcagcgcacttcgtcttcctcattccacaaaaacccatagccttccttcactctgcaggactagtgctgccaagggttcagctctacctactggtgtgctcttttgagcaagttgcttagcctctctgtaacacaaggacaatagctgcaagcatccccaaagatcattgcaggagacaatgactaaggctaccagagccgcaataaaagtcagtgaattttagcgtggtcctctctgtctctccagaacggctgccacgtggaattgctcttcctccgctacatctcggactgggacctagaccctggccgctgctaccgcgtcacctggttcacctcctggagcccctgctacgactgtgcccgacatgtggccgactttctgcgagggaaccccaacctcagtctgaggatcttcaccgcgcgcctctacttctgtgaggaccgcaaggctgagcccgaggggctgcggcggctgcaccgcgccggggtgcaaatagccatcatgaccttcaaaggtgcgaaagggccttccgcgcaggcgcagtgcagcagcccgcattcgggattgcgatgcggaatgaatgagttagtggggaagctcgaggggaagaagtgggcggggattctggttcacctctggagccgaaattaaagattagaagcagagaaaagagtgaatggctcagagacaaggccccgaggaaatgagaaaatggggccagggttgcttctttcccctcgatttggaacctgaactgtcttctacccccatatccccgcctttttttcctttttttttttttgaagattatttttactgctggaatacttttgtagaaaaccacgaaagaactttcaaagcctgggaagggctgcatgaaaattcagttcgtctctccagacagcttcggcgcatccttttggtaaggggcttcctcgctttttaaattttctttctttctctacagtcttttttggagtttcgtatatttcttatattttcttattgttcaatcactctcagttttcatctgatgaaaactttatttctcctccacatcagctttttcttctgctgtttcaccattcagagccctctgctaaggttccttttccctcccttttctttcttttgttgtttcacatctttaaatttctgtctctccccagggttgcgtttccttcctggtcagaattcttttctcctttttttttttttttttttttttttttaaacaaacaaacaaaaaacccaaaaaaactctttcccaatttactttcttccaacatgttacaaagccatccactcagtttagaagactctccggccccaccgacccccaacctcgttttgaagccattcactcaatttgcttctctctttctctacagcccctgtatgaggttgatgacttacgagacgcatttcgtactttgggactttgatagcaacttccaggaatgtcacacacgatgaaatatctctgctgaagacagtggataaaaaacagtccttcaagtcttctctgtttttattcttcaactctcactttcttagagtttacagaaaaaatatttatatacgactctttaaaaagatctatgtcttgaaaatagagaaggaacacaggtctggccagggacgtgctgcaattggtgcagttttgaatgcaacattgtcccctactgggaataacagaactgcaggacctgggagcatcctaaagtgtcaacgtttttctatgacttttaggtaggatgagagcagaaggtagatcctaaaaagcatggtgagaggatcaaatgtttttatatcaacatcctttattatttgattcatttgagttaacagtggtgttagtgatagatttttctattcttttcccttgacgtttactttcaagtaacacaaactcttccatcaggccatgatctataggacctcctaatgagagtatctgggtgattgtgaccccaaaccatctctccaaagcattaatatccaatcatgcgctgtatgttttaatcagcagaagcatgtttttatgtttgtacaaaagaagattgttatgggtggggatggaggtatagaccatgcatggtcaccttcaagctactttaataaaggatcttaaaatgggcaggaggactgtgaacaagacaccctaataatgggttgatgtctgaagtagcaaatcttctggaaacgcaaactcttttaaggaagtccctaatttagaaacacccacaaacttcacatatcataattagcaaacaattggaaggaagttgcttgaatgttggggagaggaaaatctattggctctcgtgggtctcttcatctcagaaatgccaatcaggtcaaggtttgctacattttgtatgtgtgtgatgcttctcccaaaggtatattaactatataagagagttgtgacaaaacagaatgataaagctgcgaaccgtggcacacgctcatagttctagctgcttgggaggttgaggagggaggatggcttgaacacaggtgttcaaggccagcctgggcaacataacaagatcctgtctctcaaaaaaaaaaaaaaaaaaaagaaagagagagggccgggcgtggtggctcacgcctgtaatcccagcactttgggaggccgagccgggcggatcacctgtggtcaggagtttgagaccagcctggccaacatggcaaaaccccgtctgtactcaaaatgcaaaaattagccaggcgtggtagcaggcacctgtaatcccagctacttgggaggctgaggcaggagaatcgcttgaacccaggaggtggaggttgcagtaagctgagatcgtgccgttgcactccagcctgggcgacaagagcaagactctgtctcagaaaaaaaaaaaaaaaagagagagagagagaaagagaacaatatttgggagagaaggatggggaagcattgcaaggaaattgtgctttatccaacaaaatgtaaggagccaataagggatccctatttgtctcttttggtgtctatttgtccctaacaactgtctttgacagtgagaaaaatattcagaataaccatatccctgtgccgttattacctagcaacccttgcaatgaagatgagcagatccacaggaaaacttgaatgcacaactgtcttattttaatcttattgtacataagtttgtaaaagagttaaaaattgttacttcatgtattcatttatattttatattattttgcgtctaatgattttttattaacatgatttccttttctgatatattgaaatggagtctcaaagcttcataaatttataactttagaaatgattctaataacaacgtatgtaattgtaacattgcagtaatggtgctacgaagccatttctcttgatttttagtaaacttttatgacagcaaatttgcttctggctcactttcaatcagttaaataaatgataaataattttggaagctgtgaagataaaataccaaataaaataatataaaagtgatttatatgaagttaaaataaaaaatcagtatgatggaataaacttg

SEQ ID NO: 16 - protein, 198 aa, Homo sapiens [sequence omitted]

SEQ ID NO: 17 - protein, 198 aa, Canis lupus
  REGION 1..198: note = MISC_FEATURE - Canine AID (clAID) polypeptide sequence
  REGION 1..30: note = MISC_FEATURE - Nuclear localization sequence
  REGION 183..198: note = MISC_FEATURE - Nuclear export signal
MDSLLMKQRKFLYHFKNVRWAKGRHETYLCYVVKRRDSATSFSLDFGHLRNKSGCHVELLFLRYISDWDLDPGRCYRVTWFTSWSPCYDCARHVADFLRGYPNLSLRIFAARLYFCEDRKAEPEGLRRLHRAGVQIAIMTFKDYFYCWNTFVENREKTFKAWEGLHENSVRLSRQLRRILLPLYEVDDLRDAFRTLGL

SEQ ID NO: 18 - protein, 199 aa, Bos taurus
  REGION 1..199: note = MISC_FEATURE - Bovine AID (btAID) polypeptide sequence
  REGION 1..30: note = MISC_FEATURE - Nuclear localization sequence
  REGION 183..199: note = MISC_FEATURE - Nuclear export signal
MDSLLKKQRQFLYQFKNVRWAKGRHETYLCYVVKRRDSPTSFSLDFGHLRNKAGCHVELLFLRYISDWDLDPGRCYRVTWFTSWSPCYDCARHVADFLRGYPNLSLRIFTARLYFCDKERKAEPEGLRRLHRAGVQIAIMTFKDYFYCWNTFVENHERTFKAWEGLHENSVRLSRQLRRILLPLYEVDDLRDAFRTLGL

SEQ ID NO: 19 - protein, 239 aa, Rattus sp.
  REGION 1..239: note = MISC_FEATURE - Rat AID polypeptide sequence
  REGION 1..26: note = MISC_FEATURE - Nuclear localization sequence
  REGION 194..239: note = MISC_FEATURE - Nuclear export signal
MAVGSKPKAALVGPHWERERIWCFLCSTGLGTQQTGQTSRWLRPAATQDPVSPPRSLLMKQRKFLYHFKNVRWAKGRHETYLCYVVKRRDSATSFSLDFGYLRNKSGCHVELLFLRYISDWDLDPGRCYRVTWFTSWSPCYDCARHVADFLRGNPNLSLRIFTARLTGWGALPAGLMSPARPSDYFYCWNTFVENHERTFKAWEGLHENSVRLSRRLRRILLPLYEVDDLRDAFRTLGL

SEQ ID NO: 20 - protein, 198 aa, Mus musculus [sequence omitted]

SEQ ID NO: 21 - protein, 229 aa, Rattus norvegicus [sequence omitted]

SEQ ID NO: 22 - protein, 229 aa, Mesocricetus auratus
  REGION 1..229: note = MISC_FEATURE - maAPOBEC-1 polypeptide sequence
MSSETGPVVVDPTLRRRIEPHEFDAFFDQGELRKETCLLYEIRWGGRHNIWRHTGQNTSRHVEINFIEKFTSERYFYPSTRCSIVWFLSWSPCGECSKAITEFLSGHPNVTLFIYAARLYHHTDQRNRQGLRDLISRGVTIRIMTEQEYCYCWRNFVNYPPSNEVYWPRYPNLWMRLYALELYCIHLGLPPCLKIKRRHQYPLTFFRLNLQSCHYQRIPPHILWATGFI

SEQ ID NO: 23 - protein, 236 aa, Pongo pygmaeus
  REGION 1..236: note = MISC_FEATURE - ppAPOBEC-1 polypeptide sequence
MTSEKGPSTGDPTLRRRIESWEFDVFYDPRELRKETCLLYEIKWGMSRKIWRSSGKNTTNHVEVNFIKKFTSERRFHSSISCSITWFLSWSPCWECSQAIREFLSQHPGVTLVIYVARLFWHMDQRNRQGLRDLVNSGVTIQIMRASEYYHCWRNFVNYPPGDEAHWPQYPPLWMMLYALELHCIILSLPPCLKISRRWQNHLAFFRLHLQNCHYQTIPPHILLATGLIHPSVTWR

SEQ ID NO: 24 - protein, 236 aa, Oryctolagus cuniculus
  REGION 1..236: note = MISC_FEATURE - ocAPOBEC1 polypeptide sequence
MASEKGPSNKDYTLRRRIEPWEFEVFFDPQELRKEACLLYEIKWGASSKTWRSSGKNTTNHVEVNFLEKLTSEGRLGPSTCCSITWFLSWSPCWECSMAIREFLSQHPGVTLIIFVARLFQHMDRRNRQGLKDLVTSGVTVRVMSVSEYCYCWENFVNYPPGKAAQWPRYPPRWMLMYALELYCIILGLPPCLKISRRHQKQLTFFSLTPQYCHYKMIPPYILLATGLLQPSVPWR

SEQ ID NO: 25 - protein, 235 aa, Monodelphis domestica
  REGION 1..235: note = MISC_FEATURE - mdAPOBEC-1 polypeptide sequence
MNSKTGPSVGDATLRRRIKPWEFVAFFNPQELRKETCLLYEIKWGNQNIWRHSNQNTSQHAEINFMEKFTAERHFNSSVRCSITWFLSWSPCWECSKAIRKFLDHYPNVTLAIFISRLYWHMDQQHRQGLKELVHSGVTIQIMSYSEYHYCWRNFVDYPQGEEDYWPKYPYLWIMLYVLELHCIILGLPPCLKISGSHSNQLALFSLDLQDCHYQKIPYNVLVATGLVQPFVTWR

SEQ ID NO: 26 - protein, 224 aa, Pongo pygmaeus
  REGION 1..224: note = MISC_FEATURE - ppAPOBEC-2 polypeptide sequence
MAQKEEAAAATEAASQNGEDLENLDDPEKLKELIELPPFEIVTGERLPANFFKFQFRNVEYSSGRNKTFLCYVVEAQGKGGQVQASRGYLEDEHAAAHAEEAFFNTILPAFDPALRYNVTWYVSSSPCAACADRIIKTLSKTKNLRLLILVGRLFMWEELEIQDALKKLKEAGCKLRIMKPQDFEYVWQNFVEQEEGESKAFQPWEDIQENFLYYEEKLADILK

SEQ ID NO: 27 - protein, 224 aa, Bos taurus
  REGION 1..224: note = MISC_FEATURE - btAPOBEC-2 polypeptide sequence
MAQKEEAAAAAEPASQNGEEVENLEDPEKLKELIELPPFEIVTGERLPAHYFKFQFRNVEYSSGRNKTFLCYVVEAQSKGGQVQASRGYLEDEHATNHAEEAFFNSIMPTFDPALRYMVTWYVSSSPCAACADRIVKTLNKTKNLRLLILVGRLFMWEEPEIQAALRKLKEAGCRLRIMKPQDFEYIWQNFVEQEEGESKAFEPWEDIQENFLYYEEKLADILK

SEQ ID NO: 28 - protein, 440 aa, Mus musculus
  REGION 1..440: note = MISC_FEATURE - mAPOBEC-3-(1) polypeptide sequence
MQPQRLGPRAGMGPFCLGCSHRKCYSPIRNLISQETFKFHFKNLGYAKGRKDTFLCYEVTRKDCDSPVSLHHGVFKNKDNIHAEICFLYWFHDKVLKVLSPREEFKITWYMSWSPCFECAEQIVRFLATHHNLSLDIFSSRLYNVQDPETQQNLCRLVQEGAQVAAMDLYEFKKCWKKFVDNGGRRFRPWKRLLTNFRYQDSKLQEILRPCYISVPSSSSSTLSNICLTKGLPETRFWVEGRRMDPLSEEEFYSQFYNQRVKHLCYYHRMKPYLCYQLEQFNGQAPLKGCLLSEKGKQHAEILFLDKIRSMELSQVTITCYLTWSPCPNCAWQLAAFKRDRPDLILHIYTSRLYFHWKRPFQKGLCSLWQSGILVDVMDLPQFTDCWTNFVNPKRPFWPWKGLEIISRRTQRRLRRIKESWGLQDLVNDFGNLQLGPPMS

SEQ ID NO: 29 - protein, 429 aa, Mus musculus
  REGION 1..429: note = MISC_FEATURE - APOBEC-3-(2) (Mouse APOBEC-3) polypeptide sequence
  REGION 71..108: note = MISC_FEATURE - Nucleic acid editing domain
  REGION 288..319: note = MISC_FEATURE - Nucleic acid editing domain
MGPFCLGCSHRKCYSPIRNLISQETFKFHFKNLGYAKGRKDTFLCYEVTRKDCDSPVSLHHGVFKNKDNIHAEICFLYWFHDKVLKVLSPREEFKITWYMSWSPCFECAEQIVRFLATHHNLSLDIFSSRLYNVQDPETQQNLCRLVQEGAQVAAMDLYEFKKCWKKFVDNGGRRFRPWKRLLTNFRYQDSKLQEILRPCYIPVPSSSSSTLSNICLTKGLPETRFCVEGRRMDPLSEEEFYSQFYNQRVKHLCYYHRMKPYLCYQLEQFNGQAPLKGCLLSEKGKQHAEILFLDKIRSMELSQVTITCYLTWSPCPNCAWQLAAFKRDRPDLILHIYTSRLYFHWKRPFQKGLCSLWQSGILVDVMDLPQFTDCWTNFVNPKRPFWPWKGLEIISRRTQRRLRRIKESWGLQDLVNDFGNLQLGPPMS

SEQ ID NO: 30 - protein, 430 aa, Rattus sp.
  REGION 1..430: note = MISC_FEATURE - APOBEC-3 polypeptide sequence
  REGION 72..109: note = MISC_FEATURE - Nucleic acid editing domain
  REGION 289..320: note = MISC_FEATURE - Nucleic acid editing domain
MGPFCLGCSHRKCYSPIRNLISQETFKFHFKNRLRYAIDRKDTFLCYEVTRKDCDSPVSLHHGVFKNKDNIHAEICFLYWFHDKVLKVLSPREEFKITWYMSWSPCFECAEQVLRFLATHHNLSLDIFSSRLYNIRDPENQQNLCRLVQEGAQVAAMDLYEFKKCWKKFVDNGGRRFRPWKKLLTNFRYQDSKLQEILRPCYIPVPSSSSSTLSNICLTKGLPETRFCVERRRVHLLSEEEFYSQFYNQRVKHLCYYHGVKPYLCYQLEQFNGQAPLKGCLLSEKGKQHAEILFLDKIRSMELSQVIITCYLTWSPCPNCAWQLAAFKRDRPDLILHIYTSRLYFHWKRPFQKGLCSLWQSGILVDVMDLPQFTDCWTNFVNPKRPFWPWKGLEIISRRTQRRLHRIKESWGLQDLVNDFGNLQLGPPMS

SEQ ID NO: 31 - protein, 199 aa, Homo sapiens
  REGION 1..199: note = MISC_FEATURE - hAPOBEC-3A polypeptide sequence
  REGION 70..106: note = MISC_FEATURE - Nucleic acid editing domain
MEASPASGPRHLMDPHIFTSNFNNGIGRHKTYLCYEVERLDNGTSVKMDQHRGFLHNQAKNLLCGFYGRHAELRFLDLVPSLQLDPAQIYRVTWFISWSPCFSWGCAGEVRAFLQENTHVRLRIFAARIYDYDPLYKEALQMLRDAGAQVSIMTYDEFKHCWDTFVDHQGCPFQPWDGLDEHSQALSGRLRAILQNQGN

SEQ ID NO: 32 - protein, 373 aa, Homo sapiens
  REGION 1..373: note = MISC_FEATURE - hAPOBEC-3F polypeptide sequence
  REGION 65..99: note = MISC_FEATURE - Nucleic acid editing domain
  REGION 248..283: note = MISC_FEATURE - Nucleic acid editing domain
MKPHFRNTVERMYRDTFSYNFYNRPILSRRNTVWLCYEVKTKGPSRPRLDAKIFRGQVYSQPEHHAEMCFLSWFCGNQLPAYKCFQITWFVSWTPCPDCVAKLAEFLAEHPNVTLTISAARLYYYWERDYRRALCRLSQAGARVKIMDDEEFAYCWENFVYSEGQPFMPWYKFDDNYAFLHRTLKEILRNPMEAMYPHIFYFHFKNLRKAYGRNESWLCFTMEVVKHHSPVSWKRGVFRNQVDPETHCHAERCFLSWFCDDILSPNTNYEVTWYTSWSPCPECAGEVAEFLARHSNVNLTIFTARLYYFWDTDYQEGLRSLSQEGASVEIMGYKDFKYCWENFVYNDDEPFKPWKGLKYNFLFLDSKLQEILE

SEQ ID NO: 33 - protein, 370 aa, Macaca mulatta
  REGION 1..370: note = MISC_FEATURE - Rhesus macaque APOBEC-3G polypeptide sequence
  REGION 1..61: note = MISC_FEATURE - Cytoplasmic localization signal
MVEPMDPRTFVSNFNNRPILSGLNTVWLCCEVKTKDPSGPPLDAKIFQGKVYSKAKYHPEMRFLRWFHKWRQLHHDQEYKVTWYVSWSPCTRCANSVATFLAKDPKVTLTIFVARLYYFWKPDYQQALRILCQKRGGPHATMKIMNYNEFQDCWNKFVDGRGKPFKPRNNLPKHYTLLQATLGELLRHLMDPGTFTSNFNNKPWVSGQHETYLCYKVERLHNDTWVPLNQHRGFLRNQAPNIHGFPKGRHAELCFLDLIPFWKLDGQQYRVTCFTSWSPCFSCAQEMAKFISNNEHVSLCIFAARIYDDQGRYQEGLRALHRDGAKIAMMNYSEFEYCWDTFVDRQGRPFQPWDGLDEHSQALSGRLRAI

SEQ ID NO: 34 - protein, 384 aa, Pan troglodytes
  REGION 1..384: note = MISC_FEATURE - Chimpanzee APOBEC-3G polypeptide sequence
  REGION 1..60: note = MISC_FEATURE - Cytoplasmic localization signal
  REGION 65..100: note = MISC_FEATURE - Nucleic acid editing domain
  REGION 257..291: note = MISC_FEATURE - Nucleic acid editing domain
MKPHFRNPVERMYQDTFSDNFYNRPILSHRNTVWLCYEVKTKGPSRPPLDAKIFRGQVYSKLKYHPEMRFFHWFSKWRKLHRDQEYEVTWYISWSPCTKCTRDVATFLAEDPKVTLTIFVARLYYFWDPDYQEALRSLCQKRDGPRATMKIMNYDEFQHCWSKFVYSQRELFEPWNNLPKYYILLHIMLGEILRHSMDPPTFTSNFNNELWVRGRHETYLCYEVERLHNDTWVLLNQRRGFLCNQAPHKHGFLEGRHAELCFLDVIPFWKLDLHQDYRVTCFTSWSPCFSCAQEMAKFISNNKHVSLCIFAARIYDDQGRCQEGLRTLAKAGAKISIMTYSEFKHCWDTFVDHQGCPFQPWDGLEEHSQALSGRLRAILQNQGN

SEQ ID NO: 35 - protein, 377 aa, Chlorocebus sabaeus
  REGION 1..377: note = MISC_FEATURE - Green monkey APOBEC-3G polypeptide sequence
  REGION 1..60: note = MISC_FEATURE - Cytoplasmic localization signal
  REGION 65..100: note = MISC_FEATURE - Nucleic acid editing domain
  REGION 257..290: note = MISC_FEATURE - Nucleic acid editing domain
MNPQIRNMVEQMEPDIFVYYFNNRPILSGRNTVWLCYEVKTKDPSGPPLDANIFQGKLYPEAKDHPEMKFLHWFRKWRQLHRDQEYEVTWYVSWSPCTRCANSVATFLAEDPKVTLTIFVARLYYFWKPDYQQALRILCQERGGPHATMKIMNYNEFQHCWNEFVDGQGKPFKPRKNLPKHYTLLHATLGELLRHVMDPGTFTSNFNNKPWVSGQRETYLCYKVERSHNDTWVLLNQHRGFLRNQAPDRHGFPKGRHAELCFLDLIPFWKLDDQQYRVTCFTSWSPCFSCAQKMAKFISNNKHVSLCIFAARIYDDQGRCQEGLRTLHRDGAKIAVMNYSEFEYCWDTFVDRQGRPFQPWDGLDEHSQALSGRLRAI

SEQ ID NO: 36 - protein, 384 aa, Homo sapiens
  REGION 1..384: note = MISC_FEATURE - Human APOBEC-3G polypeptide sequence
  REGION 1..60: note = MISC_FEATURE - Cytoplasmic localization signal
  REGION 65..100: note = MISC_FEATURE - Nucleic acid editing domain
  REGION 257..291: note = MISC_FEATURE - Nucleic acid editing domain
MKPHFRNTVERMYRDTFSYNFYNRPILSRRNTVWLCYEVKTKGPSRPPLDAKIFRGQVYSELKYHPEMRFFHWFSKWRKLHRDQEYEVTWYISWSPCTKCTRDMATFLAEDPKVTLTIFVARLYYFWDPDYQEALRSLCQKRDGPRATMKIMNYDEFQHCWSKFVYSQRELFEPWNNLPKYYILLHIMLGEILRHSMDPPTFTFNFNNEPWVRGRHETYLCYEVERMHNDTWVLLNQRRGFLCNQAPHKHGFLEGRHAELCFLDVIPFWKLDLDQDYRVTCFTSWSPCFSCAQEMAKFISKNKHVSLCIFTARIYDDQGRCQEGLRTLAEAGAKISIMTYSEFKHCWDTFVDHQGCPFQPWDGLDEHSQDLSGRLRAILQNQEN

SEQ ID NO: 37 - protein, 382 aa, Homo sapiens
  REGION 1..382: note = MISC_FEATURE - Human APOBEC-3B polypeptide sequence
  REGION 66..100: note = MISC_FEATURE - Nucleic acid editing domain
  REGION 251..289: note = MISC_FEATURE - Nucleic acid editing domain
MNPQIRNPMERMYRDTFYDNFENEPILYGRSYTWLCYEVKIKRGRSNLLWDTGVFRGQVYFKPQYHAEMCFLSWFCGNQLPAYKCFQITWFVSWTPCPDCVAKLAEFLSEHPNVTLTISAARLYYYWERDYRRALCRLSQAGARVTIMDYEEFAYCWENFVYNEGQQFMPWYKFDENYAFLHRTLKEILRYLMDPDTFTFNFNNDPLVLRRRQTYLCYEVERLDNGTWVLMDQHMGFLCNEAKNLLCGFYGRHAELRFLDLVPSLQLDPAQIYRVTWFISWSPCFSWGCAGEVRAFLQENTHVRLRIFAARIYDYDPLYKEALQMLRDAGAQVSIMTYDEFEYCWDTFVYRQGCPFQPWDGLEEHSQALSGRLRAILQNQGN

SEQ ID NO: 38 - protein, 395 aa, Rattus sp.
  REGION 1..395: note = MISC_FEATURE - Rat APOBEC-3B polypeptide sequence
MQPQGLGPNAGMGPVCLGCSHRRPYSPIRNPLKKLYQQTFYFHFKNVRYAWGRKNNFLCYEVNGMDCALPVPLRQGVFRKQGHIHAELCFIYWFHDKVLRVLSPMEEFKVTWYMSWSPCSKCAEQVARFLAAHRNLSLAIFSSRLYYYLRNPNYQQKLCRLIQEGVHVAAMDLPEFKKCWNKFVDNDGQPFRPWMRLRINFSFYDCKLQEIFSRMNLLREDVFYLQFNNSHRVKPVQNRYYRRKSYLCYQLERANGQEPLKGYLLYKKGEQHVEILFLEKMRSMELSQVRITCYLTWSPCPNCARQLAAFKKDHPDLILRIYTSRLYFWRKKFQKGLCTLWRSGIHVDVMDLPQFADCWTNFVNPQRPFRPWNELEKNSWRIQRRLRRIKESWGL

SEQ ID NO: 39 - protein, 226 aa, Bos taurus
  REGION 1..226: note = MISC_FEATURE - Bovine APOBEC-3B polypeptide sequence
DGWEVAFRSGTVLKAGVLGVSMTEGWAGSGHPGQGACVWTPGTRNTMNLLREVLFKQQFGNQPRVPAPYYRRKTYLCYQLKQRNDLTLDRGCFRNKKQRHAERFIDKINSLDLNPSQSYKIICYITWSPCPNCANELVNFITRNNHLKLEIFASRLYFHWIKSFKMGLQDLQNAGISVAVMTHTEFEDCWEQFVDNQSRPFQPWDKLEQYSASIRRRLQRILTAPI

SEQ ID NO: 40 - protein, 490 aa, Pan troglodytes
  REGION 1..490: note = MISC_FEATURE - Chimpanzee APOBEC-3B polypeptide sequence
MNPQIRNPMEWMYQRTFYYNFENEPILYGRSYTWLCYEVKIRRGHSNLLWDTGVFRGQMYSQPEHHAEMCFLSWFCGNQLSAYKCFQITWFVSWTPCPDCVAKLAKFLAEHPNVTLTISAARLYYYWERDYRRALCRLSQAGARVKIMDDEEFAYCWENFVYNEGQPFMPWYKFDDNYAFLHRTLKEIIRHLMDPDTFTFNFNNDPLVLRRHQTYLCYEVERLDNGTWVLMDQHMGFLCNEAKNLLCGFYGRHAELRFLDLVPSLQLDPAQIYRVTWFISWSPCFSWGCAGQVRAFLQENTHVRLRIFAARIYDYDPLYKEALQMLRDAGAQVSIMTYDEFEYCWDTFVYRQGCPFQPWDGLEEHSQALSGRLRAILQVRASSLCMVPHRPPPPPQSPGPCLPLCSEPPLGSLLPTGRPAPSLPFLLTASFSFPPPASLPPLPSLSLSPGHLPVPSFHSLTSCSIQPPCSSRIRETEGWASVSKEGRDLG

SEQ ID NO: 41 - protein, 190 aa, Homo sapiens
  REGION 1..190: note = MISC_FEATURE - Human APOBEC-3C polypeptide sequence
  REGION 65..100: note = MISC_FEATURE - Nucleic acid editing domain
MNPQIRNPMKAMYPGTFYFQFKNLWEANDRNETWLCFTVEGIKRRSVVSWKTGVFRNQVDSETHCHAERCFLSWFCDDILSPNTKYQVTWYTSWSPCPDCAGEVAEFLARHSNVNLTIFTARLYYFQYPCYQEGLRSLSQEGVAVEIMDYEDFKYCWENFVYNDNEPFKPWKGLKTNFRLLKRRLRESLQ

SEQ ID NO: 42 - protein, 190 aa, Gorilla sp.
  REGION 1..190: note = MISC_FEATURE - Gorilla APOBEC-3C polypeptide sequence
  REGION 65..100: note = MISC_FEATURE - Nucleic acid editing domain
MNPQIRNPMKAMYPGTFYFQFKNLWEANDRNETWLCFTVEGIKRRSVVSWKTGVFRNQVDSETHCHAERCFLSWECDDILSPNTNYQVTWYTSWSPCPECAGEVAEFLARHSNVNLTIFTARLYYFQDTDYQEGLRSLSQEGVAVKIMDYKDFKYCWENFVYNDDEPFKPWKGLKYNFRFLKRRLQEILE

SEQ ID NO: 43 - protein, 202 aa, Macaca mulatta
  REGION 1..202: note = MISC_FEATURE - Rhesus macaque APOBEC-3A polypeptide sequence
  REGION 72..103: note = MISC_FEATURE - Nucleic acid editing domain
MDGSPASRPRHLMDPNTFTFNFNNDLSVRGRHQTYLCYEVERLDNGTWVPMDERRGFLCNKAKNVPCGDYGCHVELRFLCEVPSWQLDPAQTYRVTWFISWSPCFRRGCAGQVRVFLQENKHVRLRIFAARIYDYDPLYQEALRTLRDAGAQVSIMTYEEFKHCWDTFVDRQGRPFQPWDGLDEHSQALSGRLRAILQNQGN

SEQ ID NO: 44 - protein, 185 aa, Bos taurus
  REGION 1..185: note = MISC_FEATURE - Bovine APOBEC-3A polypeptide sequence
  REGION 56..86: note = MISC_FEATURE - Nucleic acid editing domain
MDEYTFTENFNNQGWPSKTYLCYEMERLDGDATIPLDEYKGFVRNKGLDQPEKPCHAELYFLGKIHSWNLDRNQHYRLTCFISWSPCYDCAQKLTTFLKENHHISLHILASRIYTHNRFGCHQSGLCELQAAGARITIMTFEDFKHCWETFVDHKGKPFQPWEGLNVKSQALCTELQAILKTQQN

SEQ ID NO: 45 - protein, 200 aa, Homo sapiens
  REGION 1..200: note = MISC_FEATURE - Human APOBEC-3H polypeptide sequence
  REGION 54..88: note = MISC_FEATURE - Nucleic acid editing domain
MALLTAETFRLQFNNKRRLRRPYYPRKALLCYQLTPQNGSTPTRGYFENKKKCHAEICFINEIKSMGLDETQCYQVTCYLTWSPCSSCAWELVDFIKAHDHLNLGIFASRLYYHWCKPQQKGLRLLCGSQVPVEVMGFPKFADCWENFVDHEKPLSFNPYKMLEELDKNSRAIKRRLERIKIPGVRAQGRYMDILCDAEV

SEQ ID NO: 46 - protein, 210 aa, Macaca mulatta
  REGION 1..210: note = MISC_FEATURE - Rhesus macaque APOBEC-3H polypeptide sequence
MALLTAKTFSLQFNNKRRVNKPYYPRKALLCYQLTPQNGSTPTRGHLKNKKKDHAEIRFINKIKSMGLDETQCYQVTCYLTWSPCPSCAGELVDFIKAHRHLNLRIFASRLYYHWRPNYQEGLLLLCGSQVPVEVMGLPEFTDCWENFVDHKEPPSFNPSEKLEELDKNSQAIKRRLERIKSRSVDVLENGLRSLQLGPVTPSSSIRNSR

SEQ ID NO: 47 - protein, 386 aa, Homo sapiens
  REGION 1..386: note = MISC_FEATURE - Human APOBEC-3D polypeptide sequence
  REGION 78..109: note = MISC_FEATURE - Nucleic acid editing domain
  REGION 262..296: note = MISC_FEATURE - Nucleic acid editing domain
MNPQIRNPMERMYRDTFYDNFENEPILYGRSYTWLCYEVKIKRGRSNLLWDTGVFRGPVLPKRQSNHRQEVYFRFENHAEMCFLSWFCGNRLPANRRFQITWFVSWNPCLPCVVKVTKFLAEHPNVTLTISAARLYYYRDRDWRWVLLRLHKAGARVKIMDYEDFAYCWENFVCNEGQPFMPWYKFDDNYASLHRTLKEILRNPMEAMYPHIFYFHFKNLLKACGRNESWLCFTMEVTKHHSAVFRKRGVFRNQVDPETHCHAERCFLSWFCDDILSPNTNYEVTWYTSWSPCPECAGEVAEFLARHSNVNLTIFTARLCYFWDTDYQEGLCSLSQEGASVKIMGYKDFVSCWKNFVYSDDEPFKPWKGLQTNFRLLKRRLREILQ

SEQ ID NO: 48 - protein, 236 aa, Homo sapiens
  REGION 1..236: note = MISC_FEATURE - Human APOBEC-1 polypeptide sequence
MTSEKGPSTGDPTLRRRIEPWEFDVFYDPRELRKEACLLYEIKWGMSRKIWRSSGKNTTNHVEVNFIKKFTSERDFHPSMSCSITWFLSWSPCWECSQAIREFLSRHPGVTLVIYVARLFWHMDQQNRQGLRDLVNSGVTIQIMRASEYYHCWRNFVNYPPGDEAHWPQYPPLWMMLYALELHCIILSLPPCLKISRRWQNHLTFFRLHLQNCHYQTIPPHILLATGLIHPSVAWR

SEQ ID NO: 49 - protein, 229 aa, Mus musculus
  REGION 1..229: note = MISC_FEATURE - Mouse APOBEC-1 polypeptide sequence
MSSETGPVAVDPTLRRRIEPHEFEVFFDPRELRKETCLLYEINWGGRHSVWRHTSQNTSNHVEVNFLEKFTTERYFRPNTRCSITWFLSWSPCGECSRAITEFLSRHPYVTLFIYIARLYHHTDQRNRQGLRDLISSGVTIQIMTEQEYCYCWRNFVNYPPSNEAYWPRYPHLWVKLYVLELYCIILGLPPCLKILRRKQPQLTFFTITLQTCHYQRIPPHLLWATGLK

SEQ ID NO: 50 - protein, 224 aa, Homo sapiens
  REGION 1..224: note = MISC_FEATURE - Human APOBEC-2 polypeptide sequence
MAQKEEAAVATEAASQNGEDLENLDDPEKLKELIELPPFEIVTGERLPANFFKFQFRNVEYSSGRNKTFLCYVVEAQGKGGQVQASRGYLEDEHAAAHAEEAFFNTILPAFDPALRYNVTWYVSSSPCAACADRIIKTLSKTKNLRLLILVGRLFMWEEPEIQAALKKLKEAGCKLRIMKPQDFEYVWQNFVEQEEGESKAFQPWEDIQENFLYYEEKLADILK

SEQ ID NO: 51 - protein, 224 aa, Mus musculus
  REGION 1..224: note = MISC_FEATURE - Mouse APOBEC-2 polypeptide sequence
MAQKEEAAEAAAPASQNGDDLENLEDPEKLKELIDLPPFEIVTGVRLPVNFFKFQFRNVEYSSGRNKTFLCYVVEVQSKGGQAQATQGYLEDEHAGAHAEEAFFNTILPAFDPALKYNVTWYVSSSPCAACADRILKTLSKTKNLRLLILVSRLFMWEEPEVQAALKKLKEAGCKLRIMKPQDFEYIWQNFVEQEEGESKAFEPWEDIQENFLYYEEKLADILK

SEQ ID NO: 52 - protein, 224 aa, Rattus sp.
  REGION 1..224: note = MISC_FEATURE - Rat APOBEC-2 polypeptide sequence
MAQKEEAAEAAAPASQNGDDLENLEDPEKLKELIDLPPFEIVTGVRLPVNFFKFQFRNVEYSSGRNKTFLCYVVEAQSKGGQVQATQGYLEDEHAGAHAEEAFFNTILPAFDPALKYNVTWYVSSSPCAACADRILKTLSKTKNLRLLILVSRLFMWEEPEVQAALKKLKEAGCKLRIMKPQDFEYLWQNFVEQEEGESKAFEPWEDIQENFLYYEEKLADILK

SEQ ID NO: 53 - protein, 208 aa, Petromyzon marinus
  REGION 1..208: note = MISC_FEATURE - Petromyzon marinus CDA1 (pmCDAl) polypeptide sequence
MTDAEYVRIHEKLDIYTFKKQFFNNKKSVSHRCYVLFELKRRGERRACFWGYAVNKPQSGTERGIHAEIFSIRKVEEYLRDNPGQFTINWYSSWSPCADCAEKILEWYNQELRGNGHTLKIWACKLYYEKNARNQIGLWNLRDNGVGLNVMVSEHYQCCRKIFIQSSHNQLNENRWLEKTLKRAEKRRSELSFMIQVKILHTTKSPAV

SEQ ID NO: 54 - protein, 381 aa, Homo sapiens
  REGION 1..381: note = MISC_FEATURE - Human APOBEC3G D316R D317R polypeptide sequence
MKPHFRNTVERMYRDTFSYNFYNRPILSRRNTVWLCYEVKTKGPSRPPLDAKIFRGQVYSELKYHPEMRFFHWFSKWRKLHRDQEYEVTWYISWSPCTKCTRDMATFLAEDPKVTLTIFVARLYYFWDPDYQEALRSLCQKRDGPRATMKFNYDEFQHCWSKFVYSQRELFEPWNNLPKYYILLHFMLGEILRHSMDPPTFTFNFNNEPWVRGRHETYLCYEVERMHNDTWVLLNQRRGFLCNQAPHKHGFLEGRHAELCFLDVIPFWKLDLDQDYRVTCFTSWSPCFSCAQEMAKFISKKHVSLCIFTARIYRRQGRCQEGLRTLAEAGAKISFTYSEFKHCWDTFVDHQGCPFQPWDGLDEHSQDLSGRLRAILQNQEN

SEQ ID NO: 55 - protein, 182 aa, Homo sapiens
  REGION 1..182: note = MISC_FEATURE - Human APOBEC3G chain A polypeptide sequence
MDPPTFTFNFNNEPWWGRHETYLCYEVERMHNDTWVLLNQRRGFLCNQAPHKHGFLEGRHAELCFLDVIPFWKLDLDQDYRVTCFTSWSPCFSCAQEMAKFISKNKHVSLCIFTARIYDDQGRCQEGLRTLAEAGAKISFTYSEFKHCWDTFVDHQGCPFQPWDGLDEHSQDLSGRLRAILQ

SEQ ID NO: 56 - protein, 184 aa, Homo sapiens
  REGION 1..184: note = MISC_FEATURE - Human APOBEC3G chain A D120R D121R polypeptide sequence
MDPPTFTFNFNNEPWVRGRHETYLCYEVERMHNDTWVLLNQRRGFLCNQAPHKHGFLEGRHAELCFLDVIPFWKLDLDQDYRVTCFTSWSPCFSCAQEMAKFISKNKHVSLCIFTARIYRRQGRCQEGLRTLAEAGAKISFMTYSEFKHCWDTFVDHQGCPFQPWDGLDEHSQDLSGRLRAILQ

SEQ ID NO: 57 - protein, 367 aa, Homo sapiens
  REGION 1..367: note = MISC_FEATURE - hAPOBEC-4 polypeptide sequence
MEPIYEEYLANHGTIVKPYYWLSFSLDCSNCPYHIRTGEEARVSLTEFCQIFGFPYGTTFPQTKHLTFYELKTSSGSLVQKGHASSCTGNYIHPESMLFEMNGYLDSAIYNNDSIRHIILYSNNSPCNEANHCCISKMYNFLITYPGITLSIYFSQLYHTEMDFPASAWNREALRSLASLWPRVVLSPISGGIWHSVLHSFISGVSGSHVFQPILTGRALADRHNAYEINAITGVKPYFTDVLLQTKRNPNTKAQEALESYPLNNAFPGQFFQMPSGQLQPNLPPDLRAPVVFVLVPLRDLPPMHMGQNPNKPRNIVRHLNMPQMSFQETKDLGRLPTGRSVEIVEITEQFASSKEADEKKKKKGKK

SEQ ID NO: 58 - protein, 388 aa, Rattus norvegicus
  REGION 1..388: note = MISC_FEATURE - rAPOBEC-4 polypeptide sequence
MEPLYEEYLTHSGTIVKPYYWLSVSLNCTNCPYHIRTGEEARVPYTEFHQTFGFPWSTYPQTKHLTFYELRSSSGNLIQKGLASNCTGSHTHPESMLFERDGYLDSLIFHDSNIRHIILYSNNSPCDEANHCCISKMYNFLMNYPEVTLSVFFSQLYHTENQFPTSAWNREALRGLASLWPQVTLSAISGGIWQSILETFVSGISEGLTAVRPFTAGRTLTDRYNAYEINCITEVKPYFTDALHSWQKENQDQKVWAASENQPLHNTTPAQWQPDMSQDCRTPAVFMLVPYRDLPPIHVNPSPQKPRTVVRHLNTLQLSASKVKALRKSPSGRPVKKEEARKGSTRSQEANETNKSKWKKQTLFIKSNICHLLEREQKKIGILSSWSV

SEQ ID NO: 59 - protein, 363 aa, Macaca fascicularis
  REGION 1..363: note = MISC_FEATURE - mfAPOBEC-4 polypeptide sequence
MEPTYEEYLANHGTIVKPYYWLSFSLDCSNCPYHIRTGEEARVSLTEFCQIFGFPYGTTYPQTKHLTFYELKTSSGSLVQKGHASSCTGNYIHPESMLFEMNGYLDSAIYNNDSIRHIILYCNNSPCNEANHCCISKVYNFLITYPGITLSIYFSQLYHTEMDFPASAWNREALRSLASLWPRVVLSPISGGIWHSVLHSFVSGVSGSHVFQPILTGRALTDRYNAYEINAITGVKPFFTDVLLHTKRNPNTKAQMALESYPLNNAFPGQSFQMTSGIPPDLRAPVVFVLLPLRDLPPMHMGQDPNKPRNIIRHLNMPQMSFQETKDLERLPTRRSVETVEITERFASSKQAEEKTKKKKGKK

SEQ ID NO: 60 - protein, 218 aa, Rattus norvegicus
  REGION 1..218: note = MISC_FEATURE - rAPOBEC-1 (delta 177-186) polypeptide sequence
MSSETGPVAVDPTLRRRIEPHEFEVFFDPRELRKETCLLYEINWGGRHSIWRHTSQNTNKHVEVNFIEKFTTERYFCPNTRCSITWFLSWSPCGECSRAITEFLSRYPHVTLFIYIARLYHHADPRNRQGLRDLISSGVTIQIMTEQESGYCWRNFVNYSPSNEAHWPRYPHLWVRGLPPCLNILRRKQPQLTFFTIALQSCHYQRLPPHILWATGLK

SEQ ID NO: 61 - protein, 218 aa, Rattus norvegicus
  REGION 1..218: note = MISC_FEATURE - rAPOBEC-1 (delta 202-213) polypeptide sequence
MSSETGPVAVDPTLRRRIEPHEFEVFFDPRELRKETCLLYEINWGGRHSIWRHTSQNTNKHVEVNFIEKFTTERYFCPNTRCSITWFLSWSPCGECSRAITEFLSRYPHVTLFIYIARLYHHADPRNRQGLRDLISSGVTIQIMTEQESGYCWRNFVNYSPSNEAHWPRYPHLWVRLYVLELYCIILGLPPCLNILRRKQPQHYQRLPPHILWATGLK

SEQ ID NO: 62 - protein, 198 aa, Mus musculus
  REGION 1..198: note = MISC_FEATURE - mouse cytidine deaminase polypeptide sequence
  REGION 1..30: note = MISC_FEATURE - Nuclear localization sequence
  REGION 183..198: note = MISC_FEATURE - Nuclear export signal
MDSLLMKQKKFLYHFKNVRWAKGRHETYLCYVVKRRDSATSCSLDFGHLRNKSGCHVELLFLRYISDWDLDPGRCYRVTWFTSWSPCYDCARHVAEFLRWNPNLSLRIFTARLYFCEDRKAEPEGLRRLHRAGVQIGIMTFKDYFYCWNTFVENRERTFKAWEGLHENSVRLTRQLRRILLPLYEVDDLRDAFRMLGF

SEQ ID NO: 63 - protein, 224 aa, Petromyzon marinus
  REGION 1..224: note = MISC_FEATURE - pmCDA-1 polypeptide sequence
MAGYECVRVSEKLDFDTFEFQFENLHYATERHRTYVIFDVKPQSAGGRSRRLWGYIINNPNVCHAELILMSMIDRHLESNPGVYAMTWYMSWSPCANCSSKLNPWLKNLLEEQGHTLTMHFSRIYDRDREGDHRGLRGLKHVSNSFRMGVVGRAEVKECLAEYVEASRRTLTWLDTTESMAAKMRRKLFCILVRCAGMRESGIPLHLFTLQTPLLSGRVVWWRV

SEQ ID NO: 64 - protein, 331 aa, Petromyzon marinus
  REGION 1..331: note = MISC_FEATURE - pmCDA-2 polypeptide sequence
MELREVVDCALASCVRHEPLSRVAFLRCFAAPSQKPRGTVILFYVEGAGRGVTGGHAVNYNKQGTSIHAEVLLLSAVRAALLRRRRCEDGEEATRGCTLHCYSTYSPCRDCVEYIQEFGASTGVRVVIHCCRLYELDVNRRRSEAEGVLRSLSRLGRDFRLMGPRDAIALLLGGRLANTADGESGASGNAWVTETNVVEPLVDMTGFGDEDLHAQVQRNKQIREAYANYASAVSLMLGELHVDPDKFPFLAEFLAQTSVEPSGTPRETRGRPRGASSRGPEIGRQRPADFERALGAYGLFLHPRIVSREADREEIKRDLIVVMRKHNYQGP

SEQ ID NO: 65 - protein, 209 aa, Petromyzon marinus
  REGION 1..209: note = MISC_FEATURE - pmCDA-5 polypeptide sequence
MAGDENVRVSEKLDFDTFEFQFENLHYATERHRTYVIFDVKPQSAGGRSRRLWGYIINNPNVCHAELILMSMIDRHLESNPGVYAMTWYMSWSPCANCSSKLNPWLKNLLEEQGHTLMMHFSRIYDRDREGDHRGLRGLKHVSNSFRMGVVGRAEVKECLAEYVEASRRTLTWLDTTESMAAKMRRKLFCILVRCAGMRESGMPLHLFT

SEQ ID NO: 66 - protein, 158 aa, Saccharomyces cerevisiae
  REGION 1..158: note = MISC_FEATURE - yCD polypeptide sequence
MVTGGMASKWDQKGMDIAYEEAALGYKEGGVPIGGCLINNKDGSVLGRGHNMRFQKGSATLHGEISTLENCGRLEGKVYKDTTLYTTLSPCDMCTGAIIMYGIPRCVVGENVNFKSKGEKYLQTRGHEVVVVDDERCKKIMKQFIDERPQDWFEDIGE

SEQ ID NO: 67 - protein, 194 aa, synthetic construct
  REGION 1..194: note = cytidine deaminase polypeptide sequence
MKPQIRDHRPNPMEAMYPHIFYFHFENLEKAYGRNETWLCFTVEIIKQYLPVPWKKGVFRNQVDPETHCHAEKCFLSWFCNNTLSPKKNYQVTWYTSWSPCPECAGEVAEFLAEHSNVKLTIYTARLYYFWDTDYQEGLRSLSEEGASVEIMDYEDFQYCWENFVYDDGEPFKRWKGLKYNFQSLTRRLREILQ

SEQ ID NO: 68 - protein, 192 aa, synthetic construct
  REGION 1..192: note = cytidine deaminase polypeptide sequence
MADSSEKMRGQYISRDTFEKNYKPIDGTKEAHLLCEIKWGKYGKPWLHWCQNQRMNIHAEDYFMNNIFKAKKHPVHCYVTWYLSWSPCADCASKIVKFLEERPYLKLTIYVAQLYYHTEEENRKGLRLLRSKKVIIRVMDISDYNYCWKVFVSNQNGNEDYWPLQFDPWVKENYSRLLDIFWESKCRSPNPW

SEQ ID NO: 69 - protein, 280 aa, synthetic construct
  REGION 1..280: note = cytidine deaminase polypeptide sequence
MDPQRLRQWPGPGPASRGGYGQRPRIRNPEEWFHELSPRTFSFHFRNLRFASGRNRSYICCQVEGKNCFFQGIFQNQVPPDPPCHAELCFLSWFQSWGLSPDEHYYVTWFISWSPCCECAAKVAQFLEENRNVSLSLSAARLYYFWKSESREGLRRLSDLGAQVGIMSFQDFQHCWNNFVHNLGMPFQPWKKLHKNYQRLVTELKQILREEPATYGSPQAQGKVRIGSTAAGLRHSHSHTRSEAHLRPNHSSRQHRILNPPREARARTCVLVDASWICYR

SEQ ID NO: 70 - protein, 555 aa, synthetic construct
  REGION 1..555: note = pYY-BEM3.1; tr|F7B644|F7B644_HORSE polypeptide sequence
MPRGRARERQRRNPMEKLDAEAFSFHFLNMEFVYDRNCSYLCYQVEGRLSGSPVLSEQGVFPNEVCGKTRRHAELCFLDWFRGRLSPDEYYCVTWFISWSPCSNCAREVAEFLKRHRNVELSIFAARLYYCRDHEQGLQSLCNRGAQLAVMLRKDFTYCWDNFVHNSGREFSPWENIDANSDLLARKLEDLLKNPMEKLHRKTFSFHFRNLKFAKGRKCSYLCYRVEGRLSGSPGLSEQGVFLNEVCDENCRHAELCFLHWFRGRLSPHADYRVTWFISWSPCSNCAREVAEFLKQHRNVELHISAARLYYWQRNKPGLRNLRSSGAQLAIMFFWDFRDCWDNFVHNSGRHFIPWKKINVNSRLLATKLEDLLKNPLEKLHPNTFSFHFCNLEFAYDRKYSYLCYQVEGRLSGSPGLSEQGVFLNEVCGKTRCHAELCFLDWFRVRLSPDEYYRVTWFISWSPCFYCAREVADFLKQYRNVKLSIFAARLYYCRDHAQGLRSLCSSGAQLAIMFFWDFRYCWDNFVHNSGREFRPWKKINVNSRLLATKLEDILK

SEQ ID NO: 71 - protein, 437 aa, synthetic construct
  REGION 1..437: note = pYY-BEM3.2; tr|D1LZA1|D1LZA1_PANTI polypeptide sequence
MEPWRPSPRNPMDRIDPKTFRFQFPNLRYASGRKLCYLCFQVERDYFYYNDSDWGVFRNEVHPWAPCHAEQCFLSWFRDQYPYRDEDYNVTWFLSWSPCPTCAEEVVEFLEEYRNLTLSIFTSRLYYFWHPNYQEGLCKLWDAGVQLDIMSCDEFEYCWDNFVYHKGMRFQRRNLLKDYDFLAAKLQEILSPGQQRKRDWPFPPRPGAQVDPRSWVQEVTEPGINTRRHPLHLLVSFLLPRPTMNPLQEDIFYRQFGNQHRVPKPYYYRRKTYLCYQLKLPEGTLIDKDCLRNKKKRHAEICFIDKIKSLTRDTSQRFEIICYITWSPCPFCAEELVAFVKDNPHLSLRIFASRLYVHWRWKYQQGLRHLHASGIPVAVMSLPEFEDCWRNFVDHQDRLFQPWRNLDQYSESIKRRLGKILTPLNDLRNDFRNLKLE

SEQ ID NO: 72 - protein, 440 aa, synthetic construct
  REGION 1..440: note = pYY-BEM3.3; tr|A0A3Q0DM17|A0A3Q0DM17_TARSY polypeptide sequence
MPMKRMYSNIYFDHFNNQRLLSGQNAPWLCFKVERVENCMLVPLETGVFGNQVSGCCGKTERPVEPTSLTRSVLVSPNPGTELRAQQPSRKGHLGKLGCVEYPSPGLALVMLGYGASTYCPDSSMYCPETCHHPEMCFLYWFEKTLSHEEQYQITWYVSWSPCVNCAEEVAEFLSVHPKVNLTIYAARLYCYQKLNHRQGLRRLCKEGACVKIMNYEEFDHCWENFVYNNYKSFKPWVKLQDNYELLATELDKILRIPMERMPQKKFRFHFQNLIAKDRNTTWLCFEVKNVRKKHPPDLLERGIFQNQVTPRINCHAEMCFLSWFLENMLLHGKRYQVTWYISWSPCSICAEEVAEFLSAHPKVSLTIYAARLYYFWVPGYRQGLRRLVEEGARVEIMNYEEFDYCWENFVSINNEPFQPWEGLHEKYGYLVTKLNNILG

SEQ ID NO: 73 - protein, 453 aa, synthetic construct
  REGION 1..453: note = pYY-BEM3.4; tr|A0A3Q0DNJ5|A0A3Q0DNJ5_TARSY polypeptide sequence
MEDNPEPRPRQQMDQDTFIFNFNNDPSVRGRHQTFLCYEVEHLDDDTWVPQDKYLGFLHNQPQSRSNAYCAYHAELCFLELVSSWQLDPAQRYRVTCFISWSPCSSCAQEVAAFLKKNRHVTLRILAARIYDYYQGYEDGLRTLQGVGVDITVMTSAEFGHCWNTFVDHQGSPFQPWEGLDQHSQVIWQRMQDILQVIPAKYLMEKVKYTVTVDILFKGRVPGPRYLMDQNTFTRNFINNLSVSGRRQTLLCYEVERLGGDIWVPLDQLRGFLLSQARDVLNYYQGRHAEPCFLDLVSSWQLDPAQHYRVTWFISWSPCTSCAQAVAAFLRENRHVTLRILAARIYDYHQGYEEGLRTLQRTGAHIDIMTFKEFGHCWNTFVNHKGSPFKSWTGLDQHSQALRKRLQDILHTMASSLWDQSEPKKPIPSQEVTLPESIPPSHGNRFRLVKRPS

SEQ ID NO: 74 - protein, 424 aa, synthetic construct
  REGION 1..424: note = pYY-BEM3.5; tr|G5AYU5|G5AYU5_HETGA polypeptide sequence
FCFLSCVHRKPIERIYKKAFRFYFRNLRCAYGRNKTFLCYEVKRERDNKVLHKGVVLNQVEPYMPLHAELRFLSWFHDTLLCPLGSYQVTLYVSWSPCSECAEELTTFLAGHRNVTMTIYVAQLYYCNWKSPNREGLKILIAEDARLRVMFYDEFLYCWRNFVKNDYNNFDPWSLLDENSRYHNRILQNILKGWGRPHRVGPEGEQTATPGGSGGHCISVFSLLRRREMTLKEETFRVQFNNAYKAPKPYRRRVTYLCYQLQEANGDPLTKGCLRTKKGYHAESRFIKRICSMDLGQDQSYQVTCFLTWSPCPHCAQELVSFKRAHPHLRLQIFTARLFFHWKRSYQEGLQRLCRAQVPVAVMGHPEFAYCWDNFVDHQPGPFEPPWAKLEYYSSCLKRRLQQILRSWGVDDLTNDFRNLQLGP

SEQ ID NO: 75 - protein, 385 aa, synthetic construct
  REGION 1..385: note = pYY-BEM3.6; tr|A0A2Y9QMV5|A0A2Y9QMV5_TRIMA polypeptide sequence
MLSSPQTPGTRKPMKTLAPDEFSFNFENLRLAHGRNTTFLCFQVETKAPPSLNSPDSGIFQNQDHCPSHHHAEMVFLTWFQKRLSPAQHYEVTWYMSWSPCSRCAVQVAKFLKSNSTVNLSIFVARLYYPRELETKDGLHSLWQAGAQVQIMFFQDFKYCWENFVNNEGKPFQPWKNLDENSKDWDTELKDIHRNTTDLLTEEMFYSQFYNREKKSSIPRKTYLCYQLNEPQPVKRCLHYKKGYHAVTRFIDGIVSMNLDPARSYDITCYFTWSPCNRYARKLVSFIEDYPNLRLKVYTSRLYFHWCWTNMQGLQHLQNSRVTVAVMTFRDFEYCWKNFVDNQGKPFEPWEKLDLYSQSTERRLRRILKPLTPDVLNEDFGNLHL

SEQ ID NO: 76 - protein, 381 aa, synthetic construct
  REGION 1..381: note = pYY-BEM3.7; tr|H0XHI0|H0XHI0_OTOGA polypeptide sequence
LSCAFRDPMNRMYPKTFCQNFEKEPCPSNQNSSWLCFEVETKNSAVFFHRGVFRNQPAPPPRAPTSVLLSQGPVKTPCHAEECFLTWIQGVLPPDHHYHVTWYVSRGPCANCANLIVHFLAMHRRVTLTIFAAHLNFFWESDFQQGLLRMDQEGVQLHIMGYEEFEYCWDNFVYNQRKQFVPWNGLNENYEFMVSTLEDILRSPLDRIRQKDFSIHFRNSLWLDDKSTWLCFEVKRTKSPVPLYRGVFRNQSPPKTPCHAEVRFFTWLQDLPPDFCCQFTWYLSWSPCADCADLVANFLAKHRNVSLTIFVARLYYYRDPEMHRGLRRMYQEGANVDIMSVIEFEYCWDNFVYNQGKQFVPWNGLNENYEFLVPRLQEILE

SEQ ID NO: 77 - protein, 337 aa, synthetic construct
  REGION 1..337: note = pYY-BEM3.8; tr|A0A3M0K4Y7|A0A3M0K4Y7_HIRRU polypeptide sequence
MYISKKALRRHFDPRVYPRETYLLCELQWEGSRRVWIHWIRNVPDHHAEEYFLEEVFEPRNYGFCNITLYLSWSPCCTCCSKIRDFLKRNPNVKIDIRVARLIYPDYAETRSSLRELNGLQRVSIQVMEAAGLSCIESKNHRISQVERDPKGSSSPTLFTLQDHLKLSNMTESVIQDSVSIQICYQMRILGFQCHIRWKLQPEDFQRNYSPNQIGRVVYLLYEVRWRRGSIWRNWCSNNPEQHAEVNFLENHFHHRPQTPCSITWFLSTSPCGKCSRRILEFLKSQPNVTLEIYAAKLFRHHDIRNRQGLRNLMMNGVTIYIMNLEGNPASLCLSVD

SEQ ID NO: 78 - protein, 237 aa, synthetic construct
  REGION 1..237: note = pYY-BEM3.9; tr|A0A3P4LUZ8|A0A3P4LUZ8_GULGU polypeptide sequence
MSFEDYEYCWETFVDHKGMYFQSWDLLRDNDLLAAELKNILRSTMNPLRQEIFYHQFGNQPRAPRPYHRRKTYLCYQLQPHEGPITARVCLQNKKKRHAEIRFIDNIRALRLDRSQTFEITCYLTWSPCPTCAKALAVFVQDHPHISLRLFASRLFIHWCWKYQEGLRLLHRSRIPVAVMRLQEFEDCWRNFVDNQDEPFQPWNKLEQYSESITRRLRRILGHPQNNLENDFRNLHI

SEQ ID NO: 79 - protein, 221 aa, synthetic construct
  REGION 1..221: note = pYY-BEM3.10; tr|G5BPM8|G5BPM8_HETGA polypeptide sequence
RRRIEPWQFEASFDPRQLRRETCLLSEVRWGTSPRAWRGCSLNTARHAEVSFMDRLTSEGRLRGPVRCSITWFLSWSPCGACAQAIGEFLRQHPNVSLVIYIARLFWHVDEQNRQGLRDLVTRGVRMQVMSDPEFAHCWRNFVNYSPGQEARWPQVPPVWTWLYSLELHCILLNLPPCLKISRRHHNQLTFFQLILQNCHYQAIPSPVLLASGLIHPFVTW

SEQ ID NO: 80 - protein, 211 aa, synthetic construct
  REGION 1..211: note = pYY-BEM3.11; tr|H2M862|H2M862_ORYLA polypeptide sequence
MITKLDSVLLPKKKFIYHYKNMRWARGRHETYLCFVVKRRVGPESLSFDFGHLRNRNGCHVELLFLRHLSALCPGLWGYGATGQGRVSYSITWFCSWSPCANCSFRLAQFLSQTPNLRLRIFVSRLYFCDLEDSREREGLRMLKKVGVHITVMSYKDYFYCWQTFVARKQSKFKPWDGLHQNSVRLSRKLNRILQPCETEDFRDAFKLLGL

SEQ ID NO: 81 - protein, 353 aa, synthetic construct
  REGION 1..353: note = pYY-BEM3.12; tr|H0Y0C6|H0Y0C6_OTOGA polypeptide sequence
MYLKTFYRHFNNRPYLSRRNDTWLCFEVKTTSSNSPGSFYSGVFRNQGPRYCPWHTELCFLTWVRPIVSHHHFYQITWYMSWSPCANCAWQVATFLATHENVSLTNYTVRIYYFWRQDYRQGLLRMIEEGTQVYVMSSKEFQHCWENFVDHWGTRWVTCWNRLKKNYEFLVTRLSEILSDPKERISPNTFYNQFNNTPVPRGRKDTWLCFEVKEKNSNSPGSFHRGVFQNQVFSGTSSHARRCPPDHHYEVTWYTSWSPCAHCAWHVVNFLTSNPNVSLTIFAARLYYIYRPEIQQGLRRVFQEGAKVHIMSLKEFKYCWAKLVYNSGMRFMPWYQFNFNFLFPNTTLKGDLH

SEQ ID NO: 82 - protein, 189 aa, synthetic construct
  REGION 1..189: note = pYY-BEM3.13; tr|A0A3Q2Z5X6|A0A3Q2Z5X6_HIPCM polypeptide sequence
MDVHFMNFIYHYKNMRWAKGRNETYLCFVVKRRVGPNSLTFDFGHLRNRNGCHVELLFLRYLGRRLSYSITWFCSWSPCANCSAALSQFLSRMPNLRLRIFVARLYFCDMEDSHEREGLRLLQKAGVQVTVMSYKDYYYCWQTFVDRKKSHFKAWEDLHQNSVRLSRKLNRILQPCEMDLRDAFKLLGL

SEQ ID NO: 83 - protein, 190 aa, synthetic construct
  REGION 1..190: note = pYY-BEM3.15; tr|A0A2K6NY90|A0A2K6NY90_RHIRO polypeptide sequence
MNPHIRNPMEAMYPGTFYFHFKNLWEADNRNESWLCFAVEVIKHHSTVSWKRGVFRNQVDPETHCHAEKCFLSWFCDNTLSPKKNYQVTWYTSWSPCPECAREVAKFLARHSNVMLTIYTARLYYSQYPNYQEGLRRLNEEGVPVEIMDYEDFKYCWENFVYNGDELFKPWKGLKYNFLFLDSKLQEILE

SEQ ID NO: 84 - protein, 202 aa, synthetic construct
  REGION 1..202: note = pYY-BEM3.16; tr|Q6ICH2|Q6ICH2_HUMAN polypeptide sequence
MNPQIRNPMERMYRDTFYDNFENEPILYGRSYTWLCYEVKIKRGRSNLLWDTGVFRGPVLPKRQSNHRQEVDPETHCHAERCFLSWFCDDILSPNTNYEVTWYTSWSPCPECAGEVAEFLARHSNVNLTIFTARLCYFWDTDYQEGLCSLSQEGASVKIMGYKDFVSCWKNFVYSDDEPFKPWKGLQTNFRLLKRRLREILQ

SEQ ID NO: 85 - protein, 202 aa, synthetic construct
  REGION 1..202: note = pYY-BEM3.17; tr|G8GPV1|G8GPV1_CERNE polypeptide sequence
MDGSPASRPGHVMDPGTFTSNFNNKPWVSGQRETYLCYKVERSHNDTWVLLNQHRGFLRNQAKNRLHGDYGCHAELCFLGEVPSWRLDPTQTYRVTWFISWSPCFSGGCAEQVRAFLQENTHVRLRIFAARIYDYDFLYQEALRTLRDAGAQVSIMTYEEFKHCWDTFVDHQGRPFQPWDGLDEHSQALSGRLQAILQNQGN

SEQ ID NO: 86 - protein, 181 aa, synthetic construct
  REGION 1..181: note = pYY-BEM3.18; tr|Q1WBT6|Q1WBT6_SYMSY polypeptide sequence
MALLTAKTFRLQFNNKRRVTKPYYPRKALLCYQLTPQNGSTPTRGYFKNKKKRHAEIRFINKIKSMGLDETQCYQVTCYLTWSPCPSCAWELVDFIKAHDHLNLGIFASRLYYHWCRHQQEGLRLLCGSQVPVEVMGFPEFADCWENFVDHEEPLSFNPSEMLEELDKNSRAIKRRLEKIK

SEQ ID NO: 87 - protein, 211 aa, synthetic construct
  REGION 1..211: note = pYY-BEM3.19; tr|A0A3B4CS14|A0A3B4CS14_PYGNA polypeptide sequence
MDNTNRRKFIYHYKNVRWARGRHETYLCFVVKKRNSPDSLSFDFGHLRNRNGCHVELLFLRYIEVLCPGLWGSGVDGVRVSYAVTWFCSWSPCSNCAQRLTNFLSQTPNLRLRIFVARLYFCDEEDSLEREGLRHLQRAGVQITVMTYKDFFYCWQTFVASRERCFKAWEGLRQNSVRLSRKLNRILQVFISTPVISPLITTHLGQSWAGG

SEQ ID NO: 88 - protein, 315 aa, synthetic construct
  REGION 1..315: note = pYY-BEM3.20; tr|A0A087XZI4|A0A087XZI4_POEFO polypeptide sequence
RKVSYSVTWFCSWSPCANCSIRLAQFLHQTPNLRLRIFVSRLYFCDLEDSREREGLRILKKAGVHITVMSYKDYFYCWQTFVAKSQSKFKPWDGLHQNYIRLSRKLNRILQPALDIKKFIYHYKNLRWARGRCETYLCFVVKKKLHLFMFVIVGRNRLFDLNVTMNNKSLYLIPLHLQLLFLRHLGALCPGLWGYGVTGERKVSYSVTWFCSWSPCANCSIRLAQFLHQTPNLRLRIFVSRLYFCDLEDSREREGLRILKKAGVHITVMSYKDYFYCWQTFVAKSQSKFKPWDGLHQNYIRLSRKLNRILQVQFF

SEQ ID NO: 89 - protein, 189 aa, synthetic construct
  REGION 1..189: note = pYY-BEM3.21; tr|A0A341AEK4|A0A341AEK4_9CETA polypeptide sequence
MASDRGPSAGDATSRRRIEPWEFEVSFDPRELCKETRLLYEIKWGRSQHVWRHSGKNTTNHVECNFIEKFTSERPFHRSVSCCITWFLSWSPCWECSKAIREFLNQHPRVTLFIYVARLFQHMDPQNRQGLRDLIHSGVTIQIMGPTEYDYCWRNFVNYPPGKEAHWPRYPPPLMKLYALELHCIILVP

SEQ ID NO: 90 - protein, 180 aa, synthetic construct
  REGION 1..180: note = pYY-BEM3.22; tr|E2D879|E2D879_MUSMI polypeptide sequence
RNLISRETFNFNFENLCYAKGRKNTFLCYEVTRKDCDSPVSLCHGVFKNKGSIHAEICFLYWFHDKVLKVLTPREEFKVTWYMSWSPCFECAEQVVRFLATHHNLNLTIFSSRLYNVSDPDTQQKLCRLVQEGAQVAVMDLSEFKKCWEKFVDNDGQQFRPWKRLRTNFRYQNSKLQEIL

SEQ ID NO: 91 - protein, 221 aa, synthetic construct
  REGION 1..221: note = pYY-BEM3.23; tr|A0A2K5RDN6|A0A2K5RDN6_CEBCA polypeptide sequence
MWEAQSPGLSREWGSVAISPEDPGPLHIGRFLSCAFRHPMNAMYPGIFNFHFRNLRKAYGRNETWLCFTVEGIMNRSTVSWKSGVFRNQVGSDPFCHAEMCFLSWFRHNMLSPKKDYEVTWYASWSPCPECAGQVAEFLARHGNVRLTIFTAHLYYFWNPSFRQGLRRLSQEGASVLIMGYEDFEYCWDNFVYNDGQPFKPWKRLQDNSLSLYITLQEILQ

SEQ ID NO: 92 - protein, 206 aa, synthetic construct
  REGION 1..206: note = pYY-BEM3.24; tr|A0A2K5RDN7|A0A2K5RDN7_CEBCA polypeptide sequence
MEASPASRPRPLMGPRTFTENFTNNPEVFGRHQTYLCYEVKCQGPDGTRDLMTEQRDFLCNQARNLLSGFDGRHAERCFLDRVPSWRLDPAQTYRVTCFISWSPCFSCAREVAEFLQENPHVNLRIFAARIYDCRPRYEEGLQMLQNAGAQVSIMTSEEFRHCWDTFVDHQGHPFQPWEGLDEHSQALSRRLQAILQGNRWMILSL

SEQ ID NO: 93 - protein, 184 aa, synthetic construct
  REGION 1..184: note = pYY-BEM3.25; tr|A0A1C9CJ69|A0A1C9CJ69_CERAL polypeptide sequence
NPMKAMDPHIFYFHFKNLRKAYGRNETWLCFAVEIIKQRSTVPWRTGVFRNQVDPESHCHAERCFLSWFCEDILSPNTDYRVTWYTSWSPCLDCAGEVAEFLARHSNVELAIFAARLYYFWDTHYQQGLRSLSEKGASVEIMGYEDFKYCRENFVCDDGKPFKPWKGLKTNFRFLKRRLQEILE

SEQ ID NO: 94 - protein, 197 aa, synthetic construct
  REGION 1..197: note = pYY-BEM3.26; tr|A0A2R2Z4D2|A0A2R2Z4D2_PTEAL polypeptide sequence
MHLQVWRKVTEAWREGYTLKPWSRNPMERLYHDYFYFHFYNLPTPKHRNGCYICYQVEGTKKHSRMPLLRGVFENQESLDMMLSPGEKYRVTWYISWSPCFACVDEVIKFLREHTNVELIIFAARLYHSDILQYRQGLRKLHDAGVHVAIMSYYEFKHCLNDFVFHQGRSFCPWNDLNKNSKNLSNTLEDILRNQED

SEQ ID NO: 95 - protein, 206 aa, synthetic construct
  REGION 1..206: note = pYY-BEM3.27; tr|B7T161|B7T161_SHEEP polypeptide sequence
MTEGWAGSGLPGRGDCVWTPQTRNTMNLLRETLFKQQFGNQPRVPPPYYRRKTYLCYQLKELDDLMLDKGCFRNKKQRHAEIRFIDKINSLNLNPSQSYKIICYITWSPCPNCASELVDFITRNDHLNLQIFASRLYFHWIKPFCRGLHQLQKAGISVAVMTHTEFEDCWEQFVDNQLRPFQPWDKLEQYSASIRRRLQRILTAPT

SEQ ID NO: 96 - protein, 205 aa, synthetic construct
  REGION 1..205: note = pYY-BEM3.28; tr|A0A2R2X2G4|A0A2R2X2G4_PTEAL polypeptide sequence
MAGLGQACEGCCGQMPEISYPMGRLDPKTFSFEFKNLPYAYGRKSSYLCFQVEREQHSSPVPSDWGVFKNQFCGTEPYHAELCFLNWFRAEKLSPYEHYDVTWFLSWSPCSTCAEEIAIFLSNHKNVRLNIFVSRIYYFWKPAFRQGLQELDHLGVQLDAMSFDEFKYCWENFVDNQGMPFRCWKKVHQNYKSVLRKLNEILRRR

SEQ ID NO: 97 - protein, 309 aa, synthetic construct
  REGION 1..309: note = pYY-BEM3.29; tr|G1Q1M4|G1Q1M4_MYOLU polypeptide sequence
YAELSFLDLFQSWNLDRGRQYRLTWYMSWSPYPDCAQKLVEFLGENSHVTLRIFAADIHSLCSGYEDGLRKLRDARAQLAIMTRDELQYCWVTFVDNQGQPFRPWPNLVEHIKTKKQELKDILGNPMRRMYPKTFNFNFQNLNSYGRKSTFLCFEVETWEDGSVLDYQNGVFQNQLDPGHAELCFIEWFHEKVLFPDEVRCPDAQYHVTWYISWSPCFECAEQVAGFLNEHENVDLSISAARLYLCEDEDEQGLQDLVAAGAKVAMMAPEDFEYCWDNFVYNRGWPFTYWKHVRRNYGRLQEKLDEILW

SEQ ID NO: 98 - protein, 216 aa, synthetic construct
  REGION 1..216: note = pYY-BEM3.30; tr|A0A1S3AN78|A0A1S3AN78_ERIEU polypeptide sequence
RRIEPWEFEDFFDPRQFRPETCLLYEVRWGSSRNAWRSTARNTTRHAEVNFLERFAAERHFDKPVSCSITWFLSWSPCWECSQAIGAFLSQHPQVTLAIHVTRLFHHEDEQNRQGLRDLLARGVTLQVMGDSEYAHCWRTFVNSPPGAEGHYPRYPSDFTRLYALELHCIILGLPPCLEILRRYQNQFTLFRLVPQNCHYQMIPHLNFFVVRHYFF

SEQ ID NO: 99 - protein, 201 aa, synthetic construct
  REGION 1..201: note = pYY-BEM3.32; tr|Q4VUI3|Q4VUI3_XENLA polypeptide sequence
MTMDSMLLKRNKFIYHYKNLRWARGRHETYLCYIVKRRYSSVSCALDFGYLRNRNGCHAEMLFLRYLSIWVGHDPHRNYRVTWFSSWSPCYDCAKRTLEFLKGHPNFSLRIFSARLYFCEERNAEPEGLRKLQKAGVRLSVMSYKDYFYCWNTFVETRESGFEAWDGLHENSVRLARKLRRILQPPYDMEDLREVFVLLGL

SEQ ID NO: 100 - protein, 191 aa, synthetic construct
  REGION 1..191: note = pYY-BEM3.33; tr|E2RL86|E2RL86_CANLF polypeptide sequence
MNPLQEETFYQQFSNQRVPKPTYQRRTYLCYQLKPHEGSVIAKVCLQNQEKRHAEICFIDDIKSRQLDPSQKFEITCYVTWSPCPTCAKKLIAFVNDHPHISLRLFASRLYFHWRQKYKRELRHLQKSGIPLAVMSYLEFKDCWEKFVDHKGRPFQPWNKLKQYSESIGRRLQRILQPLNNLENDFRNLRL

SEQ ID NO: 101 - protein, 226 aa, synthetic construct
  REGION 1..226: note = pYY-BEM3.34; tr|G1LWB0|G1LWB0_AILME polypeptide sequence
SSAAPASIHLLDEDTFTENFRNDDWPSRTYLCYKVEGPDQGSGVPLGQDKGILHNKPAQGPEPSRHAECYLLEQIQSWNLDPKLHYGVTCFLSWSPCAKCAQKMARFLQENSHVSLKLFASRLYTRERWDEDYKEGLRTLKRAGASIAIMTYREFEHCWKTFVLHDQEGSCFQPWPFLHKESQKFSEKLQAILQVGVLLLSLPPPLPSSPLSSPWPFPAPLRASTG

SEQ ID NO: 102 - protein, 238 aa, synthetic construct
  REGION 1..238: note = pYY-BEM3.35; tr|A0A1U7S7K7|A0A1U7S7K7_ALLSI polypeptide sequence
MGEHWQYAGSGEYIPQDQFEENFDPSVLLAETHLLSELTWGGRPYKHWYENTEHCHAEIHFLENFSSKNRSCTITWYLSWSPCAECSARIADFMQENTNVKLNIHVARLYLHDDEHTRQGLRYLMKMKRVTIQVMTIPDYTYCWNTFLEDDGEDESDDYGGYAGVHEDEDESDDDDYLPTHFAPWIMLYSLELSCILQGFAPCLKIIQGNHMSPTFQLHVQDQEQKRLLEPANPWGAD

SEQ ID NO: 103 - protein, 220 aa, synthetic construct
  REGION 1..220: note = pYY-BEM3.36; tr|A0A2R2X2J8|A0A2R2X2J8_PTEVA polypeptide sequence
MPRIGNMNLLSEKTFNYHFGNQLRVKKPQGRRRTYLCYKLKLPNETLVKGYFINKKKNHAEIRFINKIRSLNLDQTQSYKITCYITWSPCSYCAGKLVALVKSCPHLSLQIFTSRLYYHWLWKNQAGLRYLWKINISVLVMKEPEFADCWDNFVNHQSRRFKPWEKLTQYSNSTERRLLRILRINRTDLFLAQSSEQDPGLNDLVDAIKRLFLDAHRPRD

SEQ ID NO: 104 - protein, 198 aa, synthetic construct
  REGION 1..198: note = pYY-BEM3.37; tr|A0A151P6M4|A0A151P6M4_ALLMI polypeptide sequence
MAVEEEKGLLGTSQGWKIELKDFQENYMPSTWPKVTHLLYEIRWGKGSKVWRNWCSNTLTQHAEVNCLENAFGKLQFNPPVPCHITWFLSWSPCCQCCRRILQFLRAHSHITLVIKAAQLFKHMDERNRQGLRDLVQSGVHVQVMDLPDYRYCWRTFVSHPHEGEGDFWPWFFPLWITFYTLELQHILLQQHALSYNL

SEQ ID NO: 105 - protein, 158 aa, synthetic construct
  REGION 1..158: note = pYY-BEM3.38; tr|A0A2K6MNR2|A0A2K6MNR2_RHIBE polypeptide sequence
IWLCFTMEIIKQCSTVSWKRGVFRNQVDPETHCHAERCFLSWFWEDTLSPNTNYQVTWYTSWSPCLDCAGEVAEFLARHSNVKLAIFAARLYYFWDTDYQQGLRSLSEEGTSVEIMGYEDFKYCWENFVYNGDEPFKPWKGLKYNFLFLDSKLQEILE

SEQ ID NO: 106 - protein, 182 aa, synthetic construct
  REGION 1..182: note = pYY-BEM3.40; tr|F1CGT0|F1CGT0_ANOCA polypeptide sequence
KAAILLSNLFFRWQMEPEAFQRNFDPREFPECTLLLYEIHWDNNTSRNWCTNKPGLHAEENFLQIFNEKIDIKQDTPCSITWFLSWSPCYPCSQAIIKFLEAHPNVSLEIKAARLYMHQIDCNKEGLRNLGRNRVSIMNLPDYRHCWTTFVVPRGANEDYWPQDFLPAITNYSRELDSILQD

SEQ ID NO: 107 - protein, 230 aa, synthetic construct
  REGION 1..230: note = pYY-BEM3.41; tr|C7AGG3|C7AGG3_HORSE polypeptide sequence
MDPQAPTQRGGLGQAYQGGDYVQAPGNGNTQHLLSEDVFKKQFGNQRRVTKPYYRRKTYVCYQLKLLRGPTIAKGYFRNKKKRHAEIRFIDKINSLGLDQDQSYEITCYVTWSPCATCACKLIKFTRKFPNLSLRIFVSRLYYHWFRQNQQGLRQLWASSIPVVVMGYQEFADCWENFADNRGNPFQSWEKLTEYSKGIKRRLQKILEPLNLNGLEDAMGNLKLGSVDLG

SEQ ID NO: 108 - protein, 197 aa, synthetic construct
  REGION 1..197: note = pYY-BEM3.42; tr|A0A250YMK7|A0A250YMK7_CASCN polypeptide sequence
MSLLKEDIFLYQFNNQQQVQKPYFRRRTYLCYQLEQPNGSRPQWPAKGCLQNKKGHHAEIRFIKRIHSMGLEQDQDYQITCYITWSPCLACACALAELKNHFPRLTLRIFASRLYFHWIRKFQMGLQHLYKSGVLVAVMSLPEFTDCWEKFVNHRQVFFTPWDKLEEHSRSIQRRLRRILQSWDVDDLTDDFRNLRL

SEQ ID NO: 109 - protein, 189 aa, synthetic construct
  REGION 1..189: note = pYY-BEM3.43; tr|B7T160|B7T160_SHEEP polypeptide sequence
MPWISDHVARLDPETFYFQFHNLLYAYGRNCSYICYRVKTWKHRSPVSFDWGVFHNQVYAGTHCHSERRFLSWFCAKKLRPDECYHITWFMSWSPCMKCAELVAGFLGMYQNVTLSIFTARLYYFQKPQYRKGLLRLSDQGACVDIMSYQEFKYCWKKFVYSQRRPFRPWKKLKRNYQLLAAELEDILG

SEQ ID NO: 110 - protein, 541 aa, synthetic construct
  REGION 1..541: note = pYY-BEM4.1; tr|A0A182D0J1|A0A182D0J1_BLAVI polypeptide sequence
MTNPESPPQAPCDFNEDALLNREPLRGSPIKFVSPVDYPDLVFALAGPVGVDIDYIQQSISDCLKSFDYSTEFIRITEIMQDIKCSKTIDCTDMLKEYQSKIEYANELRRAYRAKDLLAALTISAISKLREQIKERDEATNKSNIQPSRRKLAWVVRQLKTPEEVRLLRAVYGKQFVLVSIYSSPQRREDFLISKIKIKSRGTIDNNTSSEGAQRLIERDSKEDNEYGQNLSGTFCLGDIFVDSNNKESAIVSIDRFLNAFFGSNEISPTRDEYGMYLAKTASLRSCDLSRQVGAAIFSKTGEIISLGSNEVPKAGGGTYWTGDNADSRDIRLGHDPNEINKVEIFAEIISRLLEDKLLSNDLLNKDAASIVTILLSKNEGKRYKDLRVMDIIEFGRIIHAEMSAICDAARNGRAIIGATLFCTTFPCHLCAKHIVASGIGRIVYLEPYPKSYAKKLHSDSIQVEDHSDSEKVSFEPFIGISPSRYRELFEGGRRKDPFGEALKWKNDPRKPVIDVVVPPHFEAEKLVIAQLGKLIVSGTG

SEQ ID NO: 111 - protein, 330 aa, synthetic construct
  REGION 1..330: note = pYY-BEM4.2; tr|A0A2D6EXD2|A0A2D6EXD2_9ARCH polypeptide sequence
MIIGLVGTIGAGKQTIIDYLQEKYGYNALSCSDVLREILKKQGKPVTRDNLREIGNKTREEGGNGAIAKILLEKLRNNWKANYIVDSLRHPDEVSVLRTSPLFHLVAVDADLRIRFERVKARKREEEPTTLPAFVERDQKEMFGTGNEQRIRETMELADELVLNNGTVEELKQRIDDLNLVSDERLRPSWDDYFMRLARLAAQRSNCMSRKVGAIITKDRRVIATGYNGTPRGVKNCNEGGCERCNSAVAKGTAISECLCLHGEENAIIEAGRVRSEGATIYTSFLPCLWCTKMIIQAGLKEVVFSEVYDLHEASIKLFETSGVLIRRLK

SEQ ID NO: 112 - protein, 367 aa, synthetic construct
  REGION 1..367: note = pYY-BEM4.3; tr|F7YVM7|F7YVM7_9THEM polypeptide sequence
MNEFKYMSLALKLAKKGKYTTSPNPMVGAVIVKDGKILATGYHKKAGQPHAEINALSKLNFQAQNCEMYVTLEPCSHYGRTPPCADAIIRSGIRKVVIATLDPNPLVNGKGVEKLKNAGIEVVCGVLEEKAKKLNEKFFKYITTKIPFVALKIAQTLDGKIALKNGESKWITSEKSREYVHKLRMEYDAVLTGIGTILKDDPQLNVRLKKVYKQPLRIILDSKLKIPLSAKVLEDPSKVIILTTALADKEKLEELRSKGVEVIITNEKNGIVDLESALKILGEKKITSVMVEAGPTLLTSFLKESLFDKIYLFIAPKIFGADSKSVFSELGLEDISKSQKFSLESVKKIGEDLLLELYPKQLKKLEE

SEQ ID NO: 113 - protein, 449 aa, synthetic construct
  REGION 1..449: note = pYY-BEM4.4; tr|A0A3M6UNF1|A0A3M6UNF1_9CNID polypeptide sequence
MEEKSELENELMRSTSPKPSVPNGSKGNECEQRETRITKENLYMVLALWMEEFPVVEQTSSAKRLNKVGVVFVLPTDRVLAADCSRDGVHGVARVMVNHCGKLEGCKVFVSRKPCSLCAKLLVQSKVSRVFYLPIEPESENKGEIARADNLFKNSSVGQSVFVPCVEQKVLDKLEDKLPKEIITPDDISECRDNLLKKCGWSAEWFARAQASLPWPCFEGKMKSQVDNDFKSLIKWIAVVKAPMDKGVAFPKVKLTSDSRVVPDCDADNFPDSKTAYHMMIFAKMLARQTDDPKTGVGAVIVRGKVPDIVSLGWNGFPSKALYGEFPRASDDDRALQKKFPYVIHAEQNALMVRNVKDLTDGILFVTKPPCDECAPMIKLSGVKTIVIGEKIEKSRGGELSYNLIKEYIKEGIMTCYQMEATKTKAKRLASDPETRKRLKSSCSNSNDV

SEQ ID NO: 114 - protein, 414 aa, synthetic construct
  REGION 1..414: note = pYY-BEM4.5; tr|A0A2G3K826|A0A2G3K826_9BURK polypeptide sequence
MTKIIDDVNTAAAAVLDQATAAANQTTFAVGGVMVNNQTGEVISAIHNNVIIPLSNNVSFTFDPTAHGERQLVYWYYANKEALKLPEPNQITVITSLDPCAMCTGALLTAGFNVGVVAIDTYAGINCAQNFQFATLPANLRTKAQKNFGYYASGAANFKPLTRSYVGGPSVAFKNGVVTPANLRDCGTVFTQSVDTVRNTSNSTGLAPSQMSNPAELPSNSAILQAYRAIYKKAFTIKIDNPRLPDAQILTELKAVLADAPNARNAVAFIDPFGNLVLCMADAFNTSPVHAAFMNVTQEYAKTRWDLMNKYAQASTTDNPALYLTHPKYGTFVYLYAPDPDDSITIMSLGAYGSTMEGPIPNMFPSNLQFYYPPRNGAQFSELVPVVNELPPFYTQNVNISLMQVPGVTQAPTK

SEQ ID NO: 115 - protein, 308 aa, synthetic construct
  REGION 1..308: note = pYY-BEM4.6; tr|K1ZCJ4|K1ZCJ4_9BACT polypeptide sequence
MSSRAKKNRSTNLKKSIGQKSIENKPTDQKKDQVLVAYVPVIHEGYRRFFRHFPAVKELWLISQELSHELRSLQKDIRALKASETKKLLQTWGQFQKIKLLTPSSLAILQKTTTQLVFPDEEISHHLVEKYFAQNRVLFASFFLRWDKKSSLKKHDLQEYSEISNKEFDQMMIAIAQQEADKSDDWWRQVGGLIFKDETILLLAHNQHTPTEAEAYFAGDPRADFHQGEYLKISTAIHAEAYLIAQAAKQGISLEGADLYVTTFPCPVCAKQVAYSGIKRVFFREGYSLLDGETILKANGVKLIRVTV

SEQ ID NO: 116 - protein, 615 aa, synthetic construct
  REGION 1..615: note = pYY-BEM4.7; tr|A0A1G3PNQ8|A0A1G3PNQ8_9SPIR polypeptide sequence
MRDLPLLVLGLTGPMGAGCTRFARDISKMEPGKVIKKQGLLDQVAHEISELSKKASEIRLQCISNGKNSELAELKRLNRRLNAKLAERACLHVIAKSSLPEPLFISLNTIVIKIAVDSITAPEFAEWAKNHAKVADLLKWLRTQWESELTLYETWGQDAGRFSQDELEKMDAMFAEFERIGDEILKEDFETYFGKRNNDFSIRMFSENIRLSGNPFRPAENGGGGGKYDEPSMVMIARETDRYIRFYRTRSDQKRSHFFIIDEIKNPREAEYFRARHQNFFLVSIFSSSEIRASRMRRGLGHDAGVSDADFQHLFRELDSRDWGADDFDAHGLHRQNIYRCFNLADIAINNDVEDERFSEVLFNKFIRYYALMLSPGCVQPTPQETYMHLAYSLSLRSTCISRQVGAVITDLEDRILSLGWNEVPEGQIGCGLKVKKDYTDKENPLFEMEIWDNVITAEDLAVWDDEDSICVKDILSRIEIKTKLKSVSLTPEERADVLKALRIKRLEYSRSLHAEENAILQVASRGGVGLKDGTIYVTTFPCELCSKKIYQVGISKIYYTEPYPNSISEKVILKDGIRNIKILQFEGVKSYSYFKLFKPGFDKKDAQMLEGRGI

SEQ ID NO: 117 - protein, 291 aa, synthetic construct
  REGION 1..291: note = pYY-BEM4.8; tr|A0A1G0PGF4|A0A1G0PGF4_9BACT polypeptide sequence
MKHNNQLRKEIEKLLGQNSIIKNDELKKLQKEYKIETDELLISFLPYAAEFAKVPISKYKVGAVVLGKSGNIYFGSNMEFEAGALSATVHAEQSAVNNAWLNGETGINKIAVTAAPCGYCRQFLNELTTAKQLHVLLKDKNLEAAKVFKLTELLPEAFGPRDLEIEGGLMKVENHKLKIENINDELINAALEAANKSYAPYSKNYSGVSIQLSDGTIFSGRYSENAAYNPSLLPFQSALAFMNMNTKKGSNNKIVDAVLVEAVSNISQKDAAGTLLNSISKTKLRYYKIKN

SEQ ID NO: 118 - protein, 398 aa, synthetic construct
  REGION 1..398: note = pYY-BEM4.9; tr|A0A0P4WGY5|A0A0P4WGY5_9EUCA polypeptide sequence
MEENSSATSQPKCASRTKQGGNDLSTDMSNLSVGETKRTDFLPWDDYFMAVAFLSAMRSKDPSSQVGACIVNADKKIVGIGYNGMPIGCSDDELPWNKESLDPLQTKYMYVCHAEMNAIMNKNSSDLAGCCVYVALFPCNECAKLVIQAGIREVVFFSDKHQQKPETVASKKMLNMAGVAYRQYTPSQSKIELNLSLKEQEKSEPTADITQSSERDQNSKRKDYLSWEEYFMAMAHLSALRSKDPITQVGACIVNSKKKIVGIGYNGMPLGCNDDLMPWGNSSSNKLETKYMYVCHAGVNAIMNKNSCDVSGCTLYVALFPCNECAKVIIQAGIKTIIYASDTNKDQASILASKKMLDMAGIKYRADNLSQRKIVIDFKTIDWNSRFMNDHQNDPTCL

SEQ ID NO: 119 - protein, 259 aa, synthetic construct
  REGION 1..259: note = pYY-BEM4.10; tr|A0A3D8IG27|A0A3D8IG27_9HELI polypeptide sequence
MRKNILYFILTLFFLSGLYATSLPEDNVVSGVIYEKIDTVSAEVDHIYPMLALAIVYKDWQEKNMLNKQGHNIGLVIVDENNMPVFWVRNSVHATHNGTQHGEVRLVSNLLNCEGFNKYLDKYTLYTTLEPCIMCAGMLSMVQIPKVVYAQKDLSCGNTQEIISTAKYPRYYKAFTVENGYKKDLEECFEQYKICKNDSITDFLVNDSAKEIFRKASNDLQDYKVKFKENRRVIKVAQEFLQNIQTKDNLDVLQCPKNM

SEQ ID NO: 120 - protein, 256 aa, synthetic construct
  REGION 1..256: note = pYY-BEM4.11; tr|A0A351C8C4|A0A351C8C4_9BACT polypeptide sequence
MNELTKQSEHLRNEALRIATRSYVPYTGQQEGVIILLENGDLIPGVRVENASFQLTIPALQNALSTMYALQRTDISMIVSSIPFTDSDLAYTGGMAEIAWEMVGASLLLVAGAHIPEAGTFIDPARGENLLDVSREAALNAFIPESDFPVGSAIQTSDDVVIDGCNVEHSDWSKIICAERNVLSTARSYGLGQITTIYVSCPKEPGGTPCGACRQVIVELAPDATVWMDRGNQEPIAMKATKLLPGHFTGNVLKKQ

SEQ ID NO: 121 - protein, 301 aa, synthetic construct
  REGION 1..301: note = pYY-BEM4.12; tr|A0A1G6V2K7|A0A1G6V2K7_PEPNI polypeptide sequence
MPIVRVNEIGARLPEDWEALETAIWQAYVSREDLPDAGELDLTLVDDATIQELNKTHRQLDKSTDVLSFPMYDDRDDLAADVQAGLPVILGDIMISVPTAERQAQAYGHSFKREMAYLLVHGLLHIAGYDHMSAEEKSAMRRAEEAILADVDVPRDTAPSKTAAVLDEADVQALIDAARAARLQAYAPYSGYAVGAALLAADGRRFCGVNVENASYGATCCAERTALFAAVTAGARDFIALALVTEGDEPAPPCGLCRQALAEFSPDLAIYLAGPTGETYRRTSLAALFPEAFSLSTKESV

SEQ ID NO: 122 - protein, 528 aa, synthetic construct
  REGION 1..528: note = pYY-BEM4.13; tr|F2NP91|F2NP91_MARHT polypeptide sequence
MPVMETHALEARFKEALARLCPEGRLLAAVSGGGDSVALLYLLKAAGRDTIVAHLDHALRPDSAADAAFVEKLAQRLGFPLETEHVDVRALAHRKRINLEAAAREVRYAFLARVARRWKARCILTAHTLDDNAETVLLQILRGAGRGLGIRPLQRRVARPLLEFSRAELRAYLEARGARWLEDPTNRSLELDRNYLRHAVLPRITARFPHALEALARFSQAQQADDWALEALSARHLIPDRRWPVPAYRALPLERAPEALRRRAIRGVLEALGVRPEARLVADVEAALGGRAQTLPGGVVVRRQRGTLFFIPPTVRFPKVQPPAGLEARPPRPGDYLVFPYGRKRLVDFLNERGVPRELKRRWPVGAVGAEVRWVYGLWPEPDEDRYMRRALVLARAAARQGEVPIGAVLVRDGAVLAEAANAVEASRDATAHAELLALRTALRRVGEKVLPGATLYVTLEPCPMCYGAILEARVARVVYGVENLKAGAFTVHGLEPRVALEAGRVEGECAKVLKDFFARLRPGRDGA

SEQ ID NO: 123 - protein, 226 aa, synthetic construct
  REGION 1..226: note = pYY-BEM4.14; tr|A0A316TX77|A0A316TX77_9BACT polypeptide sequence
MINGYTPYSGNQNTCYVKGESGTFYPGVRIENVSYPLTISSVQAAVCSCLANSDNPVEYYTGDHQPELLQVWADEYDMKPGGKLPDSPLKLFDPLVPSIPDIKKELDVLTEKSVTPNSGFPVSALLQTEKGYIRGVNIELSSWALGLCAERVAISRALTAGYTQFKSIHIYAPEADFVSPCGACRQVLLEVMPDADTELYHGDGTLSKHIVSDLLPFGFTSHKLKK

SEQ ID NO: 124 - protein, 321 aa, synthetic construct
  REGION 1..321: note = pYY-BEM4.15; tr|R6VYG3|R6VYG3_9FIRM polypeptide sequence
MIHKGTQTIETKRLILRAFTPDDAEAAFENWMSDPKVTEFLRWKTHADISDSRKIVNEWANGSADPEFYQWAIVPKDVNEPIGTISVVDRNDALGIFHIGYCIGSKWWHKGITSEAFSAVIHFLFEEVGANRIESQHDPENIHSGDVMKKCGLTFEGTLRQADFNNRGIVDACVYSILQSEWQNNTSVWQRLYNAALTVQNDRVVSPFIDAGGVAAALMTKKGNIYTGICIDTASTLGMCAERNAVANMLTNGESRIDKIVAVMPDGKVGAPCGACREYMMQLDRDSGDIEILLDLETEKTVRLKDLIPDWWGAERFGDTE

SEQ ID NO: 125 - protein, 229 aa, synthetic construct
  REGION 1..229: note = pYY-BEM4.16; tr|A0A3C1HZ18|A0A3C1HZ18_9BACI polypeptide sequence
MGDIMENWNELSEPWKRCFLQAWKAYCHGSIPIGAVLVDSEGEIFLEGRNRVHELTAPEGQLCDCRIAHAEMNVLVQVKTSDYEKLSGATIYSTMEPCIQCFGAIILSRIKNISFAAIDDKLAGATTLEDRHGFIKSRNLNIAGPFSHLGEIQIILRTDFLLRIFDSEYADPLIAAHEKDYPIGVALGRHYHRNNRLQVAKKETIPFGELFNEFSFDIKRAREGYTLGK

SEQ ID NO: 126 - protein, 205 aa, synthetic construct
  REGION 1..205: note = pYY-BEM4.17; tr|A0A1M6KV24|A0A1M6KV24_9BACT polypeptide sequence
MEASQQNILLKIEGKGPVAEINFTVTLPEWLVEQVQSGSTVFLTQKEKMRFVLELARKNVAQETGGPFAAAVFSLESGELVSAGVNVVVESRCSSAHAEVVALSLAQKAVDSHDLGAAGLPRMVLVSSAEPCAMCMGAIPWSGVKQVICGARDEDVRSVGFDEGAKPLEWVEDFAERGIEVIRDVLREEATEVLWDYRERGGEIY

SEQ ID NO: 127 - protein, 207 aa, synthetic construct
  REGION 1..207: note = pYY-BEM4.18; tr|A0A2U0T9B4|A0A2U0T9B4_9RHIZ polypeptide sequence
METAELISRLLDVIEKDIAPVTAKGVARGNKLFGAAILKKSDLAVIVAETNNEIENPLWHGEMQAIKRFFELPADQRPATRDCLFLATHEPCSLCLSGITWSGFDNFYYLFSHQDSRDGFAIPYDIQILKSVYAVPEPETGTVSPARDLYNRSNDFWTSHGLQDMIAGLARSNREALLARIDDLNALYAELSERYQRDKGGKGIPLP

SEQ ID NO: 128 - protein, 231 aa, synthetic construct
  REGION 1..231: note = pYY-BEM4.19; tr|A0A2K9PN08|A0A2K9PN08_9FLAO polypeptide sequence
MSDKKESKIKISKTSESIELDEIHSLLSYSIVQKFWENDDRNGRGYNVGVILVDENKNIVDWDINSVNKTENSTQHGEMRLISRYLDKDELYSLKGYTMYPTLEPCAMCAGMMTMTNVYRTVNGQMDYFYSKALERLSIDTRECGGYPPYPRTVISEISPSSISTRLDAEYKQYTNAGNKPIITKFLSTYKAKTIYDDAFNQFINFKCKFPENKTKYENAIKFYNSLPESI

SEQ ID NO: 129 - protein, 330 aa, synthetic construct
  REGION 1..330: note = pYY-BEM4.20; tr|F4PWM7|F4PWM7_CAVFA polypeptide sequence
MRFSLSLLFVILSVLLAGVLACKDPYNPETVDYGQCASATKANYEVRSDSKVLTPADLPADELAVHESRMRHIIDIARVNNKKFVSSIYFPNGTLACIGINTGKPNMIAHGEIVAIQNCTEIHGISMYTNYSIYTTGEPCSMCASAILWSRFKTVVWSTYNSDLYCKICMSNIPIDSSYIFSRAYGLGIEAPVAIGGVVKAEGDAWFGTYCNRPTSIYYIAPKCACQDPAKVSPLKFTQTRTTVWVEGGDKVVTQWNAIISNPSNSTIVDPPIVISPSVVFKGAPWGISAASEPNTYKLSYNKVLFPGQTFSFGYSVYGLEEVAFTALEA

SEQ ID NO: 130 - protein, 193 aa, synthetic construct
  REGION 1..193: note = pYY-BEM4.21; tr|U7QZM1|U7QZM1_PHOTE polypeptide sequence
MNKTRRKLLATLGIMSISMSFIAQAGEKKTQVINNILSKQEITEHEKYMREAIKEAIKNPKHPFGAVIVNRNNGEILSRGVNTGRNNPILHGEIQAINHYITQYGNQGWENVALYTTGEPCSMCMSALVWIGIREVIWATSISVIRNSGIRQIDISAHEIAERASSFYNPITLVGGILANETDKLFLERKRGN

SEQ ID NO: 131 - protein, 319 aa, synthetic construct
  REGION 1..319: note = pYY-BEM4.22; tr|A0A081CH48|A0A081CH48_PSEA2 polypeptide sequence
MASRRHLLATQVTGNHRKLSLWHLRGWLSPYTKLVDAVYFLTTNSFYHSLQTPPVQSITMLLSSIITSLALAAQASAYREGLHPEFQSGLSINSVPATDRDHWMRLANSAIYYPPVSHPCPQAPFGTAIVNTTSNELICAIANRVGSTGDPTQHGEITAIQHCTNVMRKKGLSPQEIIAAWKQLSLYTNAEPCTMCLSAIRWAGFKEVIYGTSVGTISENGRNQIYIPSNLVLEKSYSFGHATLMLGNILTHETDPFFQHQFNESAPCPVGCERTQVGEARVKTCEPVPNWQKLVRLEYSEDSRVGSEPVAHTPLHLEL

SEQ ID NO: 132 - protein, 203 aa, synthetic construct
  REGION 1..203: note = pYY-BEM4.23; tr|A0A3D3HMU1|A0A3D3HMU1_9GAMM polypeptide sequence
MDYSDAILGAITSIRRNSKQPGVNVTDNVTDSSTQYNNDEYWMRRALALAREAGEAGEIPVGAVLVKDNQQVAGGFNQPIRSHDPAAHAEILTLREAGAVLGNYRLIDTTLYVTLEPCMMCAGALVHSRIKRLVFGAAEPKTGAAGSFIDLLTLPRLNHYMEVTGGVLGEECSVLLSDFFRRRRAEKKALKRQNSESGSDSAS

SEQ ID NO: 133 - protein, 270 aa, synthetic construct
  REGION 1..270: note = pYY-BEM4.24; tr|A0A1N5WT13|A0A1N5WT13_9ACTN polypeptide sequence
MLEKIERRLVAAAEAVVRSPSTGDAHTVAAAAMDANGDIYSGVNVFHFTGGPCAELVVIGSAAAANAPPLITIVAVGDGDRGVIAPCGRCRQVMLDLHPDVFVIVPTGDGQLAAKPVRELLPFGYVARTGSTAPRVVYFHPRHYDTISSGLKTATVRFQDSVQTGPAVFVFDDGESIRRLDAVVEKVESRRLDHLTEEDAHHEALPDSDALRDAIKTQYPMLGDGDVVDVATFRLTAISAPDPDPRSSYPPAVSRCNPAGPRADLLVGQS

SEQ ID NO: 134 - protein, 257 aa, synthetic construct
  REGION 1..257: note = pYY-BEM4.25; tr|X0SAC5|X0SAC5_9ZZZZ polypeptide sequence
MTKDGRVIASAHDTEVTDQDSTAHAEINAIRKASKIYRKDLTGCLIISTHEPCPMCTGSIIWSNISKVVYGVSIRDSIKAGRDMINLSCKEIIKKPNAEINIYDGILKKECLKLYNNDTRKLVKKFRKYEWINIEENLLNKRMQWFENNKTMIRKLKGNDLEKAYHLILMKIGIKRSEAPIVKKSESKIIFHSKNYCPSLEACIILDLDTREVCKEIYERPTEELIRRLNSKLRFTRNYDCIRPYSDYCEEIIILEK

SEQ ID NO: 135 - protein, 154 aa, synthetic construct
  REGION 1..154: note = pYY-BEM4.26; tr|A0A3B8IC10|A0A3B8IC10_9BACT polypeptide sequence
MPSHEDFIHQCLELGKEALLQGNPPVGSVIVWQDQVIGRGIENGRSSGDITQHAELLALQEAVATGQRDKLKEAIIYSTHEPCVMCAYPIRQYKIPTVVYSVAVPELGGHTSSWHLLTTEDVPKWGKAPKIITGISAEEVEALNAAFQDSLKKG

SEQ ID NO: 136 - protein, 180 aa, synthetic construct
  REGION 1..180: note = pYY-BEM4.27; tr|A0A2N9P8B9|A0A2N9P8B9_9FLAO polypeptide sequence
MFIFKLISPPVSIEVYQDKIIQKLYICFMENIFTDEYFMKKALQEAETAFQQGEIPVGAVIVIDNRIIARSHNLTEMLNDVTAHAEMQAITASANFLGGKYLKDCTLYVTLEPCQMCAGALYWSQISKIVYGATDEQRGYRAMGAQLHPKTKVISGIMQNECTHLMKDFFKQRRSKSTKD

SEQ ID NO: 137 - protein, 178 aa, synthetic construct
  REGION 1..178: note = pYY-BEM4.28; tr|K1KX30|K1KX30_9BACT polypeptide sequence
MVKNPVNNNELYFGKHSEIPMNEEQKAYMKMAVDLSRSGMESGKGGPFGCVIVKDGKVIGIGSNSVLETNDPTAHAEIVAIRDACRNLGHFQLDGCEVYTSCEPCPMCLGAIYWARPSKVFFANDKRDAAEAGFDDDFIYQELELPYEKRKIPFEQGMQDTAKEVFQEWILKEDKTLY

SEQ ID NO: 138 - protein, 196 aa, synthetic construct
  REGION 1..196: note = pYY-BEM4.29; tr|R4XI84|R4XI84_TAPDE polypeptide sequence
MSSEIEPPSTDVHKHAVAEAADESGAADAFMQIALQQAETALLNKEVPVGCVFVHQPTGTVLATGANQTNASLNGTLHAEFVAIESILRDHPPSIFRESDLYVTVEPCVMCASALRQLQVRKVYFGCGNDRFGGCGSVFSIHSDASKTGDAAYMVESGIFRKEAIMLLRRFYLLQNESAPKPALKSTRVLKEHFDE

SEQ ID NO: 139 - protein, 212 aa, synthetic construct
  REGION 1..212: note = pYY-BEM4.30; tr|A0A239CVF7|A0A239CVF7_9DELT polypeptide sequence
MSPASKKHFPSLFSFLLLTIGLICGTAHAQPQGHTADDTAATLANASLKEHEPFIRRCYQLAIDAGKKGNHPFGALLVHKGKIVLEAENTVLTDNDFTNHAEMNLIAEAARTLSRQIIPEATVYTSCAPCAMCTATLAMAGFTRIVYGVSHDALNKRFGLKGKSVSCPALFKTMGMELEFVGPVLEKEGLRVFDFWPEKDPHAQMLKKQARK

SEQ ID NO: 140 - protein, 320 aa, synthetic construct
  REGION 1..320: note = pYY-BEM4.31; tr|A0A1Q3NME1|A0A1Q3NME1_9BACT polypeptide sequence
MTEFNYDWAKLAFSSKRPLTNLKATFIIAPREISEKRFTQLLKEYLPKGDILLGISKEDYVEGLEGQPQFAMLQQKTLQKLIDKVNDASAHKVYTLRYFQRELPAIIEKLTPPRVVGIHGSWHHSFHTLPIYYLLSEKRIPYQLVAAFSDEDEARAYEVATDKKIVRPTLEGSFDDTTVLQLTDEVAKSSYDYGFQTGAILAEKVNGVYQPVAAGFNKVVPYQTYALLNGASRETNFSPANDMNHYDTIHAEMQILVEAAKQGISLKDKTLFVNLMPCPSCARTLSQTELSEIVYRIDHSGGYAVDLLTKVGKDIRRIVY

SEQ ID NO: 141 - protein, 180 aa, synthetic construct
  REGION 1..180: note = pYY-BEM4.32; tr|A0A2G6N4N7|A0A2G6N4N7_9DELT polypeptide sequence
MKERTVSYSDRHFMAEALEMAESALTQGEFPVGCVIADGTAVVARGHRTGTTAGAVNEIDHAEINALRHLGLAGEHLDRTDLTIYSTMEPCLMCFAAIVLSGINRIVYAYEDVMGGGTGCDLTGLPPLYRDAPLTLVAGVRRRASLNLFRRFFTDPENGYWAGSLLSRYTLNQTKDSHRL

SEQ ID NO: 142 - protein, 156 aa, synthetic construct
  REGION 1..156: note = pYY-BEM4.33; tr|A0A0G0RBB8|A0A0G0RBB8_9BACT polypeptide sequence
MQSVQYNKLTHLQRRALDEAEQVLENSYNPYSHFYVGACLISEDEQLIAGTNFENAAYGSAICAERAAVLRANAMSIRRFRGIAIIARGEDFNTTEVTGPCGSCRQVLYEISQVSGCDLQVILATSKKDKIVITTIRELLPLAFGPLDLGVDIGKY

SEQ ID NO: 143 - protein, 217 aa, synthetic construct
  REGION 1..217: note = pYY-BEM4.34; tr|A0A327L2Q5|A0A327L2Q5_9RHIZ polypeptide sequence
MVTSRDGEDEAMMARCVALSRIAVGKGEYPFGAVVAREGRIVAEAINRTIRDGDVSRHAEVIALARAQKAIGRRELRECSLYSNVEPCAMCSYCIREAWVGRVVYALGSPVMGGVSKWNILRDDGLSGRMPQVFDAAPEVVSGVLVEQAQAAWRDWSPLAWEMITLRGLMTDPSARPECRTRAARPRSLWHHLVALIERPPRPYVDPTSAAEGHADL

SEQ ID NO: 144 - protein, 162 aa, synthetic construct
  REGION 1..162: note = pYY-BEM4.35; tr|S2DR30|S2DR30_9BACT polypeptide sequence
MKMKKKIEITVSLEVIQKSEWSKEDRSLIERAIHAVEHAHAPYSNFMVGTALLLDNGQIFSANNQENVSFPVGICAERAVLSYAMGNFPNNRPVKLAVVAKRRSDSTWATVTPCGLCRQTINEYEVKFGHPIEILMLNPGEEILKASGIDQLLPFRFNDLNS

SEQ ID NO: 145 - protein, 153 aa, synthetic construct
  REGION 1..153: note = pYY-BEM4.36; tr|A0A369QGF1|A0A369QGF1_9BACT polypeptide sequence
MEEHEKWMHWCLNLAQQALQQGDFPVGAVVVQKGKLIGQGVEAGQLKKDITCHAEMEAIRDARQTINTADLQNCILYSTHEPCIMCSYVIRHHKISRVVVGTTVPEVGGSSSAYPLLSAPDISIWVAPPHLVTGVLAEACQALSQAYKQKFKK

SEQ ID NO: 146 - protein, 159 aa, synthetic construct
  REGION 1..159: note = pYY-BEM4.37; tr|A0A1W6X4U4|A0A1W6X4U4_9RHIZ polypeptide sequence
MTNPSRQERWDRRFLELAKVFGTWSKDRSAGTGCVIVGPDRLLRASGYNGFARGIDDEVPERHERPAKYSWTEHAERNAIYNAAKLGISLDGCTAYVNWFPCIDCARAIVQAGIVRLVGLHPDHADQRWGSEFKFATEMLRESGIEIILYDIPELAARK

SEQ ID NO: 147 - protein, 490 aa, synthetic construct
  REGION 1..490: note = pYY-BEM4.38; tr|A0A238BW09|A0A238BW09_9BILA polypeptide sequence
MEEMARKIRTKAKKANSYCNTMTFLISKASIVLLKAECKRIELTVVIFRFLIKMNASEPNNELCDMTVIKSMLKITHVIFDLDGLLIDTEVVFSKVNQCLLSKYNKKFTPHLRGLVTGMPKKAAVTYILEHEKLSAKVDVDEYCKKYDEMAEEMLPKCSLMPGVMKLVRHLKTHSIPMAICTGATKKEFEIKTRYHKELLDLISLRVLSGDDPAVKRGKPAPDPFLVTMDRFKQKPEKAENVLVFEDAANGVCAAIAAGMNVIMVPDLTYMKIPEGLQNKINSFSDNLIISNDLNVALMSLKKELSEEEVHFLNRAFEIAVDAVLNNEVPVGCVFVFEGQEVAFGRNDVNRTKNPTYHAEMVALKMMKQWCMDNGRDLEEIMRRTTLYVTLEPCIMCASALYHLRLKKILYGAANERFGGLVSVGTREKYGAKHFIEIMPNLSVDRAVKLLKEFYEKQNPFCPEEKRKVKKPKKSGNNNDNSDDAVALNV

SEQ ID NO: 148 - protein, 159 aa, synthetic construct
  REGION 1..159: note = pYY-BEM4.39; tr|A0A1J5H6Z0|A0A1J5H6Z0_9BACT polypeptide sequence
MAYQPSEKFMQMAIDKTREGVLSGQTPFGACIVKDGKVVACEHNTVWQDTDITSHGEVHTIRAACKAIGSIDLSGCILYSTCEPCPMCFSAIHWARIDTVVYGAFIADAQDAGFNELTISNEKMKEFGGSPVNFISGFMRDENVALFKLWKEQGANNVY

SEQ ID NO: 149 - protein, 168 aa, synthetic construct
  REGION 1..168: note = pYY-BEM4.40; tr|A0A3C2D945|A0A3C2D945_9BACT polypeptide sequence
MKTTEIRIIVHEYQNIDELTENDQYLLHEARRITEFAYAPYSGFHVGAAILLGNGMIVKGNNQENSAYPSGLCAERVALFYANANYPDSEVKTIAISAAKNGILVNDPIKPCGGCRQTLSEAEVRFGSPIRIILDGQDSILVLHGVESLLPLSFSKKDLASPLAATGR

SEQ ID NO: 150 - protein, 214 aa, synthetic construct
  REGION 1..214: note = pYY-BEM4.41; tr|A0A1I7EYS3|A0A1I7EYS3_9BURK polypeptide sequence
MKFKLDPSRPPDEDDYYLGVALAVRRKANCTGNRVAAVIVKNKRVIATGYNGVPEDMPNCLDGGCLRCSNPGGQFKSGTRYDLCICVHAEQNALLTAARFGISVEGAHLYTTMQPCFGCAKEILQAKIEKVFYLHPWVPTDVDPVMDAAMKAEYAKIIGKLKVKKLDFDDPVATWAVTTMRQAALASDKNPDKKTPPKTAKKKVAKKKSRTSPR

SEQ ID NO: 151 - protein, 155 aa, synthetic construct
  REGION 1..155: note = pYY-BEM4.42; tr|H8GQX8|H8GQX8_METAL polypeptide sequence
MNHEHFMRRAIELARQAPQYPFGAVIVRRDDGQCVGQGFNRSDLNPTYHGEMVAINDCAVRHCAEDWRGFDLYTTAEPCAMCQGAIEWAGIGRVFYGTSIPYLQKLGWWQIDLRAAEVSARAVFRDTLIVGGILETECNALFAAARRGCFGTGSE

SEQ ID NO: 152 - protein, 156 aa, synthetic construct
  REGION 1..156: note = pYY-BEM4.43; tr|A0A0S8HZN3|A0A0S8HZN3_9CHLR polypeptide sequence
MDEHDIRFLRASFDVARNARKNGNHPFGALLVDEHGRIVMEAENTVITAKDCTGHAETNLMREASSKYDSDFLANCTIYTSTEPCPMCAGAIFWSNVRRVVYGLSEESLYEIAGRGSEEVLFLSCREIFERGKKLIEVIGPLLEDEAREVHMGFWR

SEQ ID NO: 153 - protein, 193 aa, synthetic construct
  REGION 1..193: note = pYY-BEM4.44; tr|E3SF31|E3SF31_9CAUD polypeptide sequence
MKPTTVLQIAYLVSQESKCCSWKVGAVIEKNGRIISTGYNGSPAGGVNCCEHAEEQGWLLNKPKPVLIPGHKSECVRFSQVDRFVLAKAHREAHSAWSKNNEIHAELNAILFAARMGSSIEGATMYVTLSPCPDCAKAISQSGIKKLVYCETYDKNIPGWDDILKNAGIEVFNVPKRSLDKLNWENINEFCGE

SEQ ID NO: 154 - protein, 330 aa, synthetic construct
  REGION 1..330: note = pYY-BEM4.45; tr|F8AAC6|F8AAC6_THEID polypeptide sequence
MIRAPWHEYFMLLAKIVALRSGCNSRPSGAVIVKNKRILATGYNGPMPGAWHCTDRGPGYCFRREKGIPDIDKYNFCRATHAEANAIAQAARFGISVEGASLYCTLAPCYVCLKLIASAGIKKVYYEHDYGSRDFERDQFWKEAIKEAGLEKFEQITVSQEVMEQLQEILPYPTSKRRLAPTEFLDEFEDGKKYGVPSIEVLFNKLNYLTRQALKDITFVIEKTTVTEEPEGISFYLSGKMVELSELINTVKKQINADQNFYFLAKHNAIEAKIEILREAENIRLKAFLNECPLESFKRIAESLDYILYQVSNSLSLPTRLELSVNLLRI

SEQ ID NO: 155 - protein, 158 aa, synthetic construct
  REGION 1..158: note = pYY-BEM4.46; tr|A0A2H4ZNK4|A0A2H4ZNK4_9EUKA polypeptide sequence
MKKQLSRKIQEEWMSRLLRNAYDAGTYGEVPIAAVILNESGQCIGWGRNCREKDQNPLGHAEIIALRQASYLKKSWRFNECTMLVTLEPCPMCAGALLQARINHIIYGASDYKRGGFGGVLDLSKNSSAHHKIEITRGVKSIQSCQLLETWFRRRRRV

SEQ ID NO: 156 - protein, 176 aa, synthetic construct
  REGION 1..176: note = pYY-BEM4.47; tr|A0A239N5N1|A0A239N5N1_9PSED polypeptide sequence
MEGRAGIIPFDEGGAAMGPAEEDSPMQHLAYMREALALARANVEAGGRPFGAVLVRDGEVIARAANGTHLDHDPTAHAELLALRAAGRALGSPRLDGCVVYASGHPCPMCLAAMHLSGVSAAYYAYSNADGEPYGLSTAAVYAQMAQPVEWQSLPLQALRPEDEEGLYGFWRERRP

SEQ ID NO: 157 - protein, 199 aa, synthetic construct
  REGION 1..199: note = pYY-BEM4.48; tr|A0A328VTR2|A0A328VTR2_9PSED polypeptide sequence
MHPEHLALLQQAPASTHADDTWARLCCEQALLAVEEGCYAVGALLVDGAGELLCSGRNQVFAPAYASAAHAEMRVLDQLEAEHAQVDRRSLTLYVSLEPCLMCYGRILLAGITRVRYLARDRDGGFALRHGRLPPAWANLASGLSVVQAKADPYWLDLAEHAIGRLQDRQTLRQRVIRAWRGQRTLTDEFSSTKRTHSG

SEQ ID NO: 158 - protein, 402 aa, synthetic construct
  REGION 1..402: note = pYY-BEM4.49; tr|A0A103YG48|A0A103YG48_CYNCS polypeptide sequence
YIRELHASSLRRDEHEIQNPKILVIVDRLSSPSLHVSLSLSLSLVIFPPFIPLNQTPTHMENAKVVEAKDGTIAVASAFSGHQEVVQDRDHKFLTRAVEEAYKGVECGDGGPFGAVVVHKDEVVASCHNMVLKHTDPTAHAEVTAIREACKKLNKIELSDCEIYASCEPCPMCFGAIHLSRIKRLIYGAKAEAAIAIGFDDFIADALRGTGFYQKAHLEIKQADGNGAMIAEQVFEKTKAKFAIDHKFLTRAVEEAYKGVECGDGRPFGALVVHKDEVVVSCHNMVLNYTDPTAHAEITAIREACKKLNRIELSDCEMYSSCEPCPMCFGAIQISRIKRLVYGAKAEASIASGIPIGDFISDALKGTGFHEKANFEIKQADGNGAMIAEQVFERTKAMFPKR

SEQ ID NO: 159 - protein, 195 aa, synthetic construct
  REGION 1..195: note = pYY-BEM4.50; tr|W5M1M8|W5M1M8_LEPOC polypeptide sequence
NSSTRESRVMAQMEINGGASPPKKPGKGQSAADQDMITGLINKALQAKEFAYCPYSNFRVGAALMTNDGRVFTGCNVENACYNLGVCAERTAILKAVSEGYESFRAIAVSSDLQDQFISPCGACRQVMREFGTGWDVFLTKVDGSYVRMTVDELLPMSFGPDDLKKKKVFSLQNGHEVSTQFYTHSPCEAGENNN

SEQ ID NO: 160 - protein, 134 aa, synthetic construct
  REGION 1..134: note = pYY-BEM4.51; tr|A0A3N5YPZ2|A0A3N5YPZ2_9ALTE polypeptide sequence
MSNSETEHIQALVDAAQAAQKQSYSPYSSFQVGAAIFADDGNTYSGCNIENVAYPLGQCAEATAIGMMIMQGAKRIEDIMIASPNDQVCPPCGGCRQKISEFGTAETKIHMVTRSGEVSTVTLGELLPLAFDSL

SEQ ID NO: 161 - protein, 162 aa, synthetic construct
  REGION 1..162: note = pYY-BEM4.52; tr|A0A2A9NC86|A0A2A9NC86_9AGAR polypeptide sequence
MTNSTLSNEDRTRLIQGAFQARKKTYSPYSNFPVGAALLTTDGRIIEGANIENASYGGTICAERTAIVKAVSDGYRHFAGIAVTTKMPTRVSPCGICRQVLREFCSLDMPVLLVPGDYPQRNPVDDDGADKPGVITEGGVRETTLGALLPDSFGPENLPPRA

SEQ ID NO: 162 - protein, 163 aa, synthetic construct
  REGION 1..163: note = pYY-BEM4.53; tr|A0A2D6RD43|A0A2D6RD43_9GAMM polypeptide sequence
MNIENLITENDETLIRRCIELAGESVKNGDKPFGALLAKDGNIIFESSNNAKTKVPYHAEILTLMDAQDKLNTTDLSDYALYSNCEPCPMCSFMIREYKLDKVVFSVHSPYMGGQSRWNILEDDVLTRFKPYFSKPPNVVGGVLESEGKRIFDKVGLWMFGKE

SEQ ID NO: 163 - protein, 204 aa, synthetic construct
  REGION 1..204: note = pYY-BEM4.54; tr|A0A0H3AVL6|A0A0H3AVL6_BRUO2 polypeptide sequence
MHAKGYSQQERRIIPFANRFRFRELCSNKSLHGLRAKFPEQYTKWDPMRKAASITKANSATPMDIALEEAHAAGERGEVPIGAVIVRDGEIIARAGNRTREFNDVTAHAEILTIRQAGEMLGSERLIDCDLYVTLEPCAMCAAAISFARIRRLYYGASDPKGGGIEHGGRFYTQPTCHHAPEIYPGFCEADARKILKDFFREKR

SEQ ID NO: 164 - protein, 165 aa, synthetic construct
  REGION 1..165: note = pYY-BEM4.55; tr|A0A242H531|A0A242H531_9ENTE polypeptide sequence
MFIVKNNIEVIQQQAELDAKFMKQALKLAKDASNNGNEPFGAVLVKNDKVILTGENQIHTESDPTYHAELGIIRDFCTSQKITDLSEYTLYTSCEPCCMCAGAMVWSNLDRMVYGLGHDELAEIAGFNIMIGSEEIFSKSPNRPEVAKGVLKEAAVPVYVDYFQR

SEQ ID NO: 165 - protein, 181 aa, synthetic construct
  REGION 1..181: note = pYY-BEM4.56; tr|A0A2R6XZE2|A0A2R6XZE2_9BACL polypeptide sequence
MSGRISWHEYFMAQAKLIALRATCTRLMVGAVIVRDRRVIAGGYNGSIAGDEHCIDVGCKVRDGHCIRTIHAEQNALMQCAKFGVSTDGAELYVTHFPCLNCTKLLIQAGIRHIYYEVPYRVDPYAIELLEKAGVGTTQITVDLNAYVQVMSKVSTDPALTYVPESKAQKDEYGQSVGKIV

SEQ ID NO: 166 - protein, 173 aa, synthetic construct
  REGION 1..173: note = pYY-BEM4.57; tr|A0A139SHT6|A0A139SHT6_9BACT polypeptide sequence
MSEANASSESLPSRNSPVELIAEAAGKFGRRPTWDEYFMATAVLISTRSSCERLNVGCVIVTAGESHKNRIVAAGYNGHLPGSPHTSRMRDGHEQATVHAEQNAISDAARRGSSVEGCTAYVTHYPCINCAKILASAGIAKICYRLDYHNDPLVKPMLAEAGIEIVQLGEAAS

SEQ ID NO: 167 - protein, 170 aa, synthetic construct
  REGION 1..170: note = pYY-BEM4.58; tr|A0A261DBH2|A0A261DBH2_9RICK polypeptide sequence
MVMKKKLITVKRSTEFNNFFMEEALKQAQFALDKNEIPVGAIIVNRITNKVIAKAHNIVEQTKNPVLHAEIVAINQSCQILSSKNLSDCDMYVTLEPCVMCSGAISFARIGRLFYAANDPKQGAIENGGRFFNSKSCFYRPEIYSGFSAKISENLIKEFFYNVRYQKCNP

SEQ ID NO: 168 - protein, 146 aa, synthetic construct
  REGION 1..146: note = pYY-BEM4.59; tr|A0A2N0XZK6|A0A2N0XZK6_9VIBR polypeptide sequence
MTDNSLHESYMRQAFELSKSALPGCRPNPPVGCVFVKDGEVVSSGFSQPPGNHHAEAGAIAAYTGSYDGLVAYVTLEPCSFQGRTPSCAKALVRVRPEKVYVAILDPDTRNSGAGIKILEDAGIDVEVGLLGEEVASFLNPYLIRN

SEQ ID NO: 169 - protein, 159 aa, synthetic construct
  REGION 1..159: note = pYY-BEM4.60; tr|A0A1V5R0F9|A0A1V5R0F9_9BACT polypeptide sequence
MTKKETTKLHALDDFCMKKALLLAKRAFRADEVPVGALVVDSSNKVIGRGYNQVEKRKSQRAHAEQLAIEQACKKIGDWRLEGCTLYVTLEPCTMCMGLIKLSRIERVVFGAASPLFGYQLDKNRKSQLYKKGVIKIRKGVGKATAAALLKDFFKNKRM

SEQ ID NO: 170 - protein, 167 aa, synthetic construct
  REGION 1..167: note = pYY-BEM4.61; tr|A0A2W0H8Y3|A0A2W0H8Y3_9BACI polypeptide sequence
MKNNGRLDHEYFMTEALQEAKEAGQRGDLPIGAVIVHNGRIIARGSNMRKTAGIKISHAENNAMHNCAPYLMKHASECVIYTTLEPCIMCLTTLVMANIDSIVFAADDKYMNMKPFIDANSYIRDRIHQYKGGVCRGESEALLRKYSPYAAELALNGTHPHHRKGGA

SEQ ID NO: 171 - protein, 165 aa, synthetic construct
  REGION 1..165: note = pYY-BEM4.62; tr|A0A261BDB7|A0A261BDB7_CAERE polypeptide sequence
LYKLYIFRMTTTKANLTQFEQELVDKAVGAMEKAYCKYSGFKVGAALVCEDGEIIIGANHENASYGATICAERSAMVTALTKGHRKFKLLAVATELEAPCSPCGICRQYLIEFGDYKVILGSSTSDQIIETTTYGLLPYAFTPKSLDDHEKEAEERNHQEGEKKH

SEQ ID NO: 172 - protein, 162 aa, synthetic construct
  REGION 1..162: note = pYY-BEM4.63; tr|A0A2E1PHI6|A0A2E1PHI6_9GAMM polypeptide sequence
MKELLIHSWLMLNSNSKLIMERVIELSEINLKNGKIPIAAVIVDKKNYEIISESQNEDSPIGHAELLAITKALKKLNTNRLDSTNLFVTIEPCPMCAYAISKCHINRLYFGSEDEKGGGVINGPRIFESHNLKKIDYVSHCYHEKTTQLMQSFFQLKRNQQL

SEQ ID NO: 173 - protein, 133 aa, synthetic construct
  REGION 1..133: note = pYY-BEM4.64; tr|A0A378LUA7|A0A378LUA7_9GAMM polypeptide sequence
MDTIIKKMISNAHNTLAHSYSPYSKFSVASCICTDKDNFYTGVNVENSAYGLAICAETSAISAMVTAGEKRIKSMVVMAGTNILCSPCGACRQRIYEFSTPDTLIHLCDKNSILRTFKINELLPEAFKFDFNP

SEQ ID NO: 174 - protein, 370 aa, synthetic construct
  REGION 1..370: note = pYY-BEM4.65; tr|A0A139HQ78|A0A139HQ78_9PEZI polypeptide sequence
MADSLKSKPGHARHDTALIHGLSQSDVQKLSESCVDAKSKAYCPYSHFRVGCAVLLANGDVVQGANVENAAYPVGTCAERVALGTAVGAKKGDFRALAVSTDISPPASPCGMCRQFIREFCELNTPILMYDKDGKSVVMTLEQLLPMSFGPDKLLPPGQLENGLMQTQTQSSFVTRAFSTTSSRRQDDTPQVPQSHYDFFPQTFPQGPPPKTSFSPDLKQLRKEFLQLQAKAHPDLAPQDQKRRAEALSMRINEAYKTLQSPLRRAQYLLSQQGIDVEDETAKLDDSSLLMEVMEAREAVEEVEDEEQLNEIRAENNGRIEESVRVLEDAFRDNEFEKAAQEAIRLRYWVNIEESIQGWEKGNGGGILHH

SEQ ID NO: 175 - protein, 165 aa, synthetic construct
  REGION 1..165: note = pYY-BEM4.66; tr|A0A2A9FXV0|A0A2A9FXV0_9VIBR polypeptide sequence
MCNLKENKDMDKYFHFACDATIEGMREGTGGPFGATLTRNGEVVCSVANTVLKDMDISGHAEMVAVREACKKLDTLDLSDCVMYATCEPCPMCVSVMLWAGIKTCYYASTHLDAAKHGFSDQQLRDYLDGSDTSTLNMVHIEDNRDDCAKIWTEFRHLNETKNDG

SEQ ID NO: 176 - protein, 509 aa, synthetic construct
  REGION 1..509: note = pYY-BEM4.67; tr|A0A1A8AG96|A0A1A8AG96_NOTFU polypeptide sequence
MEHSDRWSRAEPGLSTSSRETRDGSTQTDCKLQGHGPRLSKVNLFTLLSLWMELFPQEQDEENGQSQIRRSGLVVVREGKVVGLHCSGADLHAGQAAILQHGASLANCQLFFSRRPCATCLKMIINAGVRQITFWPGDPEISMLTSNQTHSQRTSQSITEASLDATAVEKLKSNSRPQICVLMQPLAPGVLQFVDETSRRSDFMERMMDDDPELDSEKLFNSDRLRHLKDFCRHFLIQTDQRHKDILSQMGLKNFCVEPYFSNLRSNMTELVEVLAAVAAGMPQQHYGFYREESLSLDPHPVDVSQAVARHCIVQARLLSYRTEDPKVGVGAVIWAKGQSACCCGTGRLYLIGCGYNAYPAGSKYAEYPQMDNKQEDRERRKYRYIVHAEQNALTFRTRDIKPDECSMLFVTKCPCDECIPLIRGAGVKHIYTSDQDRDKDKGDISYLRFGSLKGVCKFIWQRSPPVSSASSLHLTNGCVGKHVRQAEQQIYKNKKLCTKGSSGSSDIC

SEQ ID NO: 177 - protein, 148 aa, synthetic construct
  REGION 1..148: note = pYY-BEM4.68; tr|A0A3E2VN88|A0A3E2VN88_9FIRM polypeptide sequence
MEKEITNMDKQKLIQMAVDGLGRSYAPYSHFHVSAALLCADGTVYTGNNIENAAYTPSVCAERCAIFKAVGDGRREFEAIAVCGGPDGVIEDYCPPCGVCRQVMREFCDPSSFRVLVAKTAEDYREYTLEQLLPDGFGPDHLTGSGER

SEQ ID NO: 178 - protein, 221 aa, synthetic construct
  REGION 1..221: note = pYY-BEM4.69; tr|A0A2D5ZRJ2|A0A2D5ZRJ2_9BACT polypeptide sequence
MARPVHLHTGERRTEEGATESRAVAAVATAITRAPRAPPRPATGRERDGPPPRRVFGGGLRVGDPSGYDRGESKPIGGPLTEKRSDWHSYFMRIAGEVATRATCDRKHVGAVIVRNRTILSTGYNGSIRGMPHCDDVGHDMVDGHCIATIHAEANAILQAARNGVMIQDGSIYITASPCWNCFKLVANAGLKRVYYGEFYRDKRSFEVARRLGIDLMHIEV

SEQ ID NO: 179 - protein, 155 aa, synthetic construct
  REGION 1..155: note = pYY-BEM4.70; tr|A0A1B8WPS3|A0A1B8WPS3_9BACI polypeptide sequence
MEGVQLIYQFQWGNLIMTVNKEDLYLIDVARNTIKTLYVDGKHHVGAAVRTKTGKIYSAVHLEANIGRVSVCAEAIALGKAISEGESEFDTIVAVRHPDPTQENQKIEVVSPCGICRELISDYGKGTNVILKNKEGYIKTVISDLLPNKYIREDN

SEQ ID NO: 180 - protein, 156 aa, synthetic construct
  REGION 1..156: note = pYY-BEM4.71; tr|A0A1W5ZQK9|A0A1W5ZQK9_9BACI polypeptide sequence
MNRFMERAVSLAAENVRVGGQPFGAVLVKDDELVAEGVNEMHLNYDVSGHAELLAIRRAQGELQTHDLSGYTMYASGEPCPMCLSAMYFAGIKDVFYCATVEEAAQVGLEKSKNVYDDLQKSKGERSLVMKQMPLEDDQEDPMKLWDERTNHNGTS

SEQ ID NO: 181 - protein, 340 aa, synthetic construct
  REGION 1..340: note = pYY-BEM4.72; tr|A0A378V0W4|A0A378V0W4_MYCFO polypeptide sequence
MVHAQFDPTARQALAATAVEAKTRKDLTWQQIADAAELSPAFVTAAVLGQHALPARSAEAVAALLGLDDDAALLLQTIPIRGSIPGGIPTDPTIYRFYEMLQVYGTTLKALVHEQFGDGIISAINFKLDVRKVADPEGGERAVITLDGKYLPPNPFDRVRYRGGLMDFAQRTIDIARQNVAEGGRPFATVIVKNGEILAESPNLVAQTHDPTAHAEILAIRKACTRIGTEHLIGATIYVLAQPCPMCLGSLYYCSPDEVVFLTTRDAYEPHYVDDRKYFELNMFYDEFAKPWDQRRLPMRYEPRDAAVDVYKLWQERNGGERRVPGAPTSTRPGKNPRGE

SEQ ID NO: 182 - protein, 157 aa, synthetic construct
  REGION 1..157: note = pYY-BEM4.73; tr|I3XF03|I3XF03_RHIFR polypeptide sequence
MKQRCMSPKSAQRFWDNDMHNNKDRPMSENELFVAAREAMAKAHAPYSKFPVGAAIRAEDGQIYTGANIENLSFPEGWCAETTAISHMVMAGQRKIMEVAVIAEKLALCPPCGGCRQRLAEFSGASTRIYLCDETGIKKSLALSDLLPHSFETEILG

SEQ ID NO: 183 - protein, 595 aa, synthetic construct
  REGION 1..595: note = pYY-BEM4.74; tr|F8IEF3|F8IEF3_ALIAT polypeptide sequence
MDAKELETRGWLCMRAVDVIDKKRRGEALAEEELRFLIEGYVAGRIPDYQMSAFLMAVVWRGMTREETLVLTRLLADSGERLDLSGIPGVKVDKHSTGGVGDKATLVVLPLVASIGVPVIKMSGRGLGHTGGTIDKLESIPGFRTDLSVAELVAQVRQVGIALGGQTADLAPADKKLYALRDVTGTVESLPLIASSVMSKKLAGGADAIVLDVKVGDGAFMKSRSDARRLARLMVEIGEAAGRRTVAVLSNMDQPLGCAIGNALEVAEAIRVLSGEGPFDLAEIALALAEEMTVLAGVAATREEARRMLRQSVAEGRALETLRRWIAAQGGDPAVVDDPSRLPQAPVQMPYLPKKAGFVAKLSALAFGLAAMRLGAGRETKEEAIDPSVGIVLHAKVGDRVQTHRPMFTVHARTGEDALRCIQELEAAIQISDDPVEAPPLILARIDRSEALPYADLMDAAREARDRAYVPYSGFAVGAALELADGRMVTGANVENASYGLTNCAERSAVFRAVAEGGPGTKPEIRAVAVIADSPEPVSPCGACRQVLAEFCSPDTPVYLGNLQGDVRETTVGALLPGAFTDAQMANVRRQDKEA

SEQ ID NO: 184 - protein, 153 aa, synthetic construct
  REGION 1..153: note = pYY-BEM4.75; tr|A0A1G3M638|A0A1G3M638_9SPIR polypeptide sequence
MKTTNINALDKWDLRFLQMAEHVAEWSKDPSTKVGAVIVRPDRTIASVGFNGFARGVRDTVERLWNRELKYPLTVHAELNAILSAHEPVRGHSLYVSPLSPCSNCAGVIIQSGIARVVAKCGQVNNPAQWSESFNLALTAFAEAGVSVILVEH

SEQ ID NO: 185 - protein, 177 aa, synthetic construct
  REGION 1..177: note = pYY-BEM4.76; tr|A0A3D9LFR2|A0A3D9LFR2_9MICC polypeptide sequence
MEQNDHGSSGAFSDPFEDDIPLTASLPRITGTGSGIDWQRLESTARAAMTRAYVPYSRFPVGAAALVEDGRVVAGCNIENASLGLTLCAECSLVSNLQMSGGGRIVAFYCVDGNGEVLMPCGRCRQLLYEFHAPGMRLMGPDGELTMDEVLPLAFGPADMTHLSDSAASTDDPGRTR

SEQ ID NO: 186 - protein, 172 aa, synthetic construct
  REGION 1..172: note = pYY-BEM4.77; tr|A0A3B9YGB5|A0A3B9YGB5_9BACT polypeptide sequence
MAKPISKKYRKLIETAKAARKKAYSPYSRYQVGAAVLTESGRIYSGANMENASYGLCMCAERVAIANAVTRGEKVLQAVCVVGKKARPCGACRQVMLEFSTKETELLMVDIDPNARRDTVIRTRVYSMLPNPFDPFESGMLPQHPQNLLRRRKSPQPRRKRRSRPVHREVSR

SEQ ID NO: 187 - protein, 391 aa, synthetic construct
  REGION 1..391: note = pYY-BEM4.78; tr|A0A182F569|A0A182F569_ANOAL polypeptide sequence
MPRPSQFRVSSSQSLSNSQIQASQSSDSVVDITSYVNAVVKALLNLSCTKTIIKRADLVNIALKGNGRLIGRVLQDANIELKEIYGYELIEVEKSKTMILCSTLAAGSMDELNDANRRRYTFLYLILGYIFMKNGSVPETIVWEFLETLGIEEQQEHNYFGDVRKLYDSLFKQAYLTRTKQALEGLNDDVMLISWGVRSKHEVSKKDILAGFCKVMNRDPVDFKAQYIEANEKDDKMNNNINGTVDGRNTVEYSSLDASVKELIEAAIKVRNNAYCPYSNFAVGAALRTVGGDIVTGCNVENGTFGPSVCAERTAVCKAVSEGHREFTAVAVVAFQETEFTAPCGTCRQTLSEFSRKDIPIYLVKPSPVRVMVTSLFQLLPHAFSPSFLNK

SEQ ID NO: 188 - protein, 151 aa, synthetic construct
  REGION 1..151: note = pYY-BEM4.79; tr|A0A264Z0D4|A0A264Z0D4_9BACI polypeptide sequence
MEPKKLIEEAIVASKQAYVQYSNFHVGAALLTKDGKLYHGCNIENASYGLTNCAERTAIFKAVSEGEKEFQAIAVVGDTEGPISPCGACRQVLAEFFSPDTVVILANLKGDHVVTNINELLPGFFSSKDLQKKVKNCFEKNALGSSCLRPI

SEQ ID NO: 189 - protein, 229 aa, synthetic construct
  REGION 1..229: note = pYY-BEM4.80; tr|A0A1L9Q1R3|A0A1L9Q1R3_ASPVE polypeptide sequence
MPLSAEEAALVETATATINSIPLSEDYSVASAAKASDGRVFTGVNVYHFTGGPCAELVVLGVAAAAGAAQLTHIVAVANEQRGILSPCGRCRQVLLDLQPNIQVIVGKEGSEQSVPVAQLLPFSYRQPDQHTPVIFKALTSSGPVVVDFFATWCGPCKAVAPVVGKLSETYTDVRFIQVDVDKARSISQEHDIRAMPTFVLYKDGKLLDKRVVGGNMKELEEQIKAIIA

SEQ ID NO: 190 - protein, 18 aa, synthetic construct
  REGION 1..18: note = synthetic peptide
KRTADGSEFESPKKKRKV

SEQ ID NO: 191 - protein, 16 aa, synthetic construct
  REGION 1..16: note = synthetic peptide
KRPAATKKAGQAKKKK

SEQ ID NO: 192 - protein, 17 aa, synthetic construct
  REGION 1..17: note = synthetic peptide
KKTELQTTNAENKTKKL

SEQ ID NO: 193 - protein, 19 aa, synthetic construct
  REGION 1..19: note = synthetic peptide
KRGINDRNFWRGENGRKTR

SEQ ID NO: 194 - protein, 16 aa, synthetic construct
  REGION 1..16: note = synthetic peptide
RKSGKIAAIVVKRPRK

SEQ ID NO: 195 - protein, 7 aa, synthetic construct
  REGION 1..7: note = synthetic peptide
PKKKRKV

SEQ ID NO: 196 - protein, 30 aa, synthetic construct
  REGION 1..30: note = synthetic polypeptide
MDSLLMNRRKFLYQFKNVRWAKGRRETYLC

SEQ ID NO: 197 - protein, 1368 aa, Streptococcus pyogenes [sequence omitted]

SEQ ID NO: 198 - DNA, 4104 bp, Streptococcus pyogenes
  misc_feature 1..4104: note = wild type spCas9 polynucleotide sequence
  source 1..4104: mol_type = genomic DNA
atggataagaaatactcaataggcttagatatcggcacaaatagcgtcggatgggcggtgatcactgatgattataaggttccgtctaaaaagttcaaggttctgggaaatacagaccgccacagtatcaaaaaaaatcttataggggctcttttatttggcagtggagagacagcggaagcgactcgtctcaaacggacagctcgtagaaggtatacacgtcggaagaatcgtatttgttatctacaggagattttttcaaatgagatggcgaaagtagatgatagtttctttcatcgacttgaagagtcttttttggtggaagaagacaagaagcatgaacgtcatcctatttttggaaatatagtagatgaagttgcttatcatgagaaatatccaactatctatcatctgcgaaaaaaattggcagattctactgataaagcggatttgcgcttaatctatttggccttagcgcatatgattaagtttcgtggtcattttttgattgagggagatttaaatcctgataatagtgatgtggacaaactatttatccagttggtacaaatctacaatcaattatttgaagaaaaccctattaacgcaagtagagtagatgctaaagcgattctttctgcacgattgagtaaatcaagacgattagaaaatctcattgctcagctccccggtgagaagagaaatggcttgtttgggaatctcattgctttgtcattgggattgacccctaattttaaatcaaattttgatttggcagaagatgctaaattacagctttcaaaagatacttacgatgatgatttagataatttattggcgcaaattggagatcaatatgctgatttgtttttggcagctaagaatttatcagatgctattttactttcagatatcctaagagtaaatagtgaaataactaaggctcccctatcagcttcaatgattaagcgctacgatgaacatcatcaagacttgactcttttaaaagctttagttcgacaacaacttccagaaaagtataaagaaatcttttttgatcaatcaaaaaacggatatgcaggttatattgatgggggagctagccaagaagaattttataaatttatcaaaccaattttagaaaaaatggatggtactgaggaattattggtgaaactaaatcgtgaagatttgctgcgcaagcaacggacctttgacaacggctctattccccatcaaattcacttgggtgagctgcatgctattttgagaagacaagaagacttttatccatttttaaaagacaatcgtgagaagattgaaaaaatcttgacttttcgaattccttattatgttggtccattggcgcgtggcaatagtcgttttgcatggatgactcggaagtctgaagaaacaattaccccatggaattttgaagaagttgtcgataaaggtgcttcagctcaatcatttattgaacgcatgacaaactttgataaaaatcttccaaatgaaaaagtactaccaaaacatagtttgctttatgagtattttacggtttataacgaattgacaaaggtcaaatatgttactgagggaatgcgaaaaccagcatttctttcaggtgaacagaagaaagccattgttgatttactcttcaaaacaaatcgaaaagtaaccgttaagcaattaaaagaagattatttcaaaaaaatagaatgttttgatagtgttgaaatttcaggagttgaagatagatttaatgcttcattaggcgcctaccatgatttgctaaaaattattaaagataaagattttttggataatgaagaaaatgaagatatcttagaggatattgttttaacattgaccttatttgaagatagggggatgattgaggaaagacttaaaacatatgctcacctctttgatgataaggtgatgaaacagcttaaacgtcgccgttatactggttggggacgtttgtctcgaaaattgattaatggtattagggataagcaatctggcaaaacaatattagattttttgaaatcagatggttttgccaatcgcaattttatgcagctgatccatgatgatagtttgacatttaaagaagatattcaaaaagcacaggtgtctggacaaggccatagtttacatgaacagattgctaacttagctggcagtcctgctattaaaaaaggtattttacagactgtaaaaattgttgatgaactggtcaaagtaatggggcataagccagaaaatatcgttattgaaatggcacgtgaaaatcagacaactcaaaagggccagaaaaattcgcgagagcgtatgaaacgaatcgaagaaggtatcaaagaattaggaagtcagattcttaaagagcatcctgttgaaaatactcaattgcaaaatgaaaagctctatctctattatctacaaaatggaagagacatgtatgtggaccaagaattagatattaatcgtttaagtgattatgatgtcgatcacattgttccacaaagtttcattaaagacgattcaatagacaataaggtactaacgcgttctgataaaaatcgtggtaaatcggataacgttccaagtgaagaagtagtcaaaaagatgaaaaactattggagacaacttctaaacgccaagttaatcactcaacgtaagtttgataatttaacgaaagctgaacgtggaggtttgagtgaacttgataaagctggttttatcaaacgccaattggttgaaactcgccaaatcactaagcatgtggcacaaattttggatagtcgcatgaatactaaatacgatgaaaatgataaacttattcgagaggttaaagtgattaccttaaaatctaaattagtttctgacttccgaaaagatttccaattctataaagtacgtgagattaacaattaccatcatgcccatgatgcgtatctaaatgccgtcgttggaactgctttgattaagaaatatccaaaacttgaatcggagtttgtctatggtgattataaagtttatgatgttcgtaaaatgattgctaagtctgagcaagaaataggcaaagcaaccgcaaaatatttcttttactctaatatcatgaacttcttcaaaacagaaattacacttgcaaatggagagattcgcaaacgccctctaatcgaaactaatggggaaactggagaaattgtctgggataaagggcgagattttgccacagtgcgcaaagtattgtccatgccccaagtcaatattgtcaagaaaacagaagtacagacaggcggattctccaaggagtcaattttaccaaaaagaaattcggacaagcttattgctcgtaaaaaagactgggatccaaaaaaatatggtggttttgatagtccaacggtagcttattcagtcctagtggttgctaaggtggaaaaagggaaatcgaagaagttaaaatccgttaaagagttactagggatcacaattatggaaagaagttcctttgaaaaaaatccgattgactttttagaagctaaaggatataaggaagttaaaaaagacttaatcattaaactacctaaatatagtctttttgagttagaaaacggtcgtaaacggatgctggctagtgccggagaattacaaaaaggaaatgagctggctctgccaagcaaatatgtgaattttttatatttagctagtcattatgaaaagttgaagggtagtccagaagataacgaacaaaaacaattgtttgtggagcagcataagcattatttagatgagattattgagcaaatcagtgaattttctaagcgtgttattttagcagatgccaatttagataaagttcttagtgcatataacaaacatagagacaaaccaatacgtgaacaagcagaaaatattattcatttatttacgttgacgaatcttggagctcccgctgcttttaaatattttgatacaacaattgatcgtaaacgatatacgtctacaaaagaagttttagatgccactcttatccatcaatccatcactggtctttatgaaacacgcattgatttgagtcagctaggaggtgactga

SEQ ID NO: 199 - protein, 1367 aa, Streptococcus pyogenes
  REGION 1..1367: note = MISC_FEATURE - spCas9 polypeptide sequence
MDKKYSIGLDIGTNSVGWAVITDDYKVPSKKFKVLGNTDRHSIKKNLIGALLFGSGETAEATRLKRTARRRYTRRKNRICYLQEIFSNEMAKVDDSFFHRLEESFLVEEDKKHERHPIFGNIVDEVAYHEKYPTIYHLRKKLADSTDKADLRLIYLALAHMIKFRGHFLIEGDLNPDNSDVDKLFIQLVQIYNQLFEENPINASRVDAKAILSARLSKSRRLENLIAQLPGEKRNGLFGNLIALSLGLTPNFKSNFDLAEDAKLQLSKDTYDDDLDNLLAQIGDQYADLFLAAKNLSDAILLSDILRVNSEITKAPLSASMIKRYDEHHQDLTLLKALVRQQLPEKYKEIFFDQSKNGYAGYIDGGASQEEFYKFIKPILEKMDGTEELLVKLNREDLLRKQRTFDNGSIPHQIHLGELHAILRRQEDFYPFLKDNREKIEKILTFRIPYYVGPLARGNSRFAWMTRKSEETITPWNFEEVVDKGASAQSFIERMTNFDKNLPNEKVLPKHSLLYEYFTVYNELTKVKYVTEGMRKPAFLSGEQKKAIVDLLFKTNRKVTVKQLKEDYFKKIECFDSVEISGVEDRFNASLGAYHDLLKIIKDKDFLDNEENEDILEDIVLTLTLFEDRGMIEERLKTYAHLFDDKVMKQLKRRRYTGWGRLSRKLINGIRDKQSGKTILDFLKSDGFANRNFMQLIHDDSLTFKEDIQKAQVSGQGHSLHEQIANLAGSPAIKKGILQTVKIVDELVKVMGHKPENIVIEMARENQTTQKGQKNSRERMKRIEEGIKELGSQILKEHPVENTQLQNEKLYLYYLQNGRDMYVDQELDINRLSDYDVDHIVPQSFIKDDSIDNKVLTRSDKNRGKSDNVPSEEVVKKMKNYWRQLLNAKLITQRKFDNLTKAERGGLSELDKAGFIKRQLVETRQITKHVAQILDSRMNTKYDENDKLIREVKVITLKSKLVSDFRKDFQFYKVREINNYHHAHDAYLNAVVGTALIKKYPKLESEFVYGDYKVYDVRKMIAKSEQEIGKATAKYFFYSNIMNFFKTEITLANGEIRKRPLIETNGETGEIVWDKGRDFATVRKVLSMPQVNIVKKTEVQTGGFSKESILPKRNSDKLIARKKDWDPKKYGGFDSPTVAYSVLVVAKVEKGKSKKLKSVKELLGITIMERSSFEKNPIDFLEAKGYKEVKKDLIIKLPKYSLFELENGRKRMLASAGELQKGNELALPSKYVNFLYLASHYEKLKGSPEDNEQKQLFVEQHKHYLDEIIEQISEFSKRVILADANLDKVLSAYNKHRDKPIREQAENIIHLFTLTNLGAPAAFKYFDTTIDRKRYTSTKEVLDATLIHQSITGLYETRIDLSQLGGD

SEQ ID NO: 200 - DNA, 4212 bp, synthetic construct
  misc_feature 1..4212: note = wild-type Cas9 polynucleotide sequence
  misc_feature 5..58: note = RuvC domain
  misc_feature 718..764: note = RuvC domain
  misc_feature 772..901: note = HNH domain
  misc_feature 906..1101: note = RuvC domain
  source 1..4212: mol_type = other DNA
atggataaaaagtattctattggtttagacatcggcactaattccgttggatgggctgtcataaccgatgaatacaaagtaccttcaaagaaatttaaggtgttggggaacacagaccgtcattcgattaaaaagaatcttatcggtgccctcctattcgatagtggcgaaacggcagaggcgactcgcctgaaacgaaccgctcggagaaggtatacacgtcgcaagaaccgaatatgttacttacaagaaatttttagcaatgagatggccaaagttgacgattctttctttcaccgtttggaagagtccttccttgtcgaagaggacaagaaacatgaacggcaccccatctttggaaacatagtagatgaggtggcatatcatgaaaagtacccaacgatttatcacctcagaaaaaagctagttgactcaactgataaagcggacctgaggttaatctacttggctcttgcccatatgataaagttccgtgggcactttctcattgagggtgatctaaatccggacaactcggatgtcgacaaactgttcatccagttagtacaaacctataatcagttgtttgaagagaaccctataaatgcaagtggcgtggatgcgaaggctattcttagcgcccgcctctctaaatcccgacggctagaaaacctgatcgcacaattacccggagagaagaaaaatgggttgttcggtaaccttatagcgctctcactaggcctgacaccaaattttaagtcgaacttcgacttagctgaagatgccaaattgcagcttagtaaggacacgtacgatgacgatctcgacaatctactggcacaaattggagatcagtatgcggacttatttttggctgccaaaaaccttagcgatgcaatcctcctatctgacatactgagagttaatactgagattaccaaggcgccgttatccgcttcaatgatcaaaaggtacgatgaacatcaccaagacttgacacttctcaaggccctagtccgtcagcaactgcctgagaaatataaggaaatattctttgatcagtcgaaaaacgggtacgcaggttatattgacggcggagcgagtcaagaggaattctacaagtttatcaaacccatattagagaagatggatgggacggaagagttgcttgtaaaactcaatcgcgaagatctactgcgaaagcagcggactttcgacaacggtagcattccacatcaaatccacttaggcgaattgcatgctatacttagaaggcaggaggatttttatccgttcctcaaagacaatcgtgaaaagattgagaaaatcctaacctttcgcataccttactatgtgggacccctggcccgagggaactctcggttcgcatggatgacaagaaagtccgaagaaacgattactccatggaattttgaggaagttgtcgataaaggtgcgtcagctcaatcgttcatcgagaggatgaccaactttgacaagaatttaccgaacgaaaaagtattgcctaagcacagtttactttacgagtatttcacagtgtacaatgaactcacgaaagttaagtatgtcactgagggcatgcgtaaacccgcctttctaagcggagaacagaagaaagcaatagtagatctgttattcaagaccaaccgcaaagtgacagttaagcaattgaaagaggactactttaagaaaattgaatgcttcgattctgtcgagatctccggggtagaagatcgatttaatgcgtcacttggtacgtatcatgacctcctaaagataattaaagataaggacttcctggataacgaagagaatgaagatatcttagaagatatagtgttgactcttaccctctttgaagatcgggaaatgattgaggaaagactaaaaacatacgctcacctgttcgacgataaggttatgaaacagttaaagaggcgtcgctatacgggctggggacgattgtcgcggaaacttatcaacgggataagagacaagcaaagtggtaaaactattctcgattttctaaagagcgacggcttcgccaataggaactttatgcagctgatccatgatgactctttaaccttcaaagaggatatacaaaaggcacaggtttccggacaaggggactcattgcacgaacatattgcgaatcttgctggttcgccagccatcaaaaagggcatactccagacagtcaaagtagtggatgagctagttaaggtcatgggacgtcacaaaccggaaaacattgtaatcgagatggcacgcgaaaatcaaacgactcagaaggggcaaaaaaacagtcgagagcggatgaagagaatagaagagggtattaaagaactgggcagccagatcttaaaggagcatcctgtggaaaatacccaattgcagaacgagaaactttacctctattacctacaaaatggaagggacatgtatgttgatcaggaactggacataaaccgtttatctgattacgacgtcgatcacattgtaccccaatcctttttgaaggacgattcaatcgacaataaagtgcttacacgctcggataagaaccgagggaaaagtgacaatgttccaagcgaggaagtcgtaaagaaaatgaagaactattggcggcagctcctaaatgcgaaactgataacgcaaagaaagttcgataacttaactaaagctgagaggggtggcttgtctgaacttgacaaggccggatttattaaacgtcagctcgtggaaacccgccaaatcacaaagcatgttgcacagatactagattcccgaatgaatacgaaatacgacgagaacgataagctgattcgggaagtcaaagtaatcactttaaagtcaaaattggtgtcggacttcagaaaggattttcaattctataaagttagggagataaataactaccaccatgcgcacgacgcttatcttaatgccgtcgtagggaccgcactcattaagaaatacccgaagctagaaagtgagtttgtgtatggtgattacaaagtttatgacgtccgtaagatgatcgcgaaaagcgaacaggagataggcaaggctacagccaaatacttcttttattctaacattatgaatttctttaagacggaaatcactctggcaaacggagagatacgcaaacgacctttaattgaaaccaatggggagacaggtgaaatcgtatgggataagggccgggacttcgcgacggtgagaaaagttttgtccatgccccaagtcaacatagtaaagaaaactgaggtgcagaccggagggttttcaaaggaatcgattcttccaaaaaggaatagtgataagctcatcgctcgtaaaaaggactgggacccgaaaaagtacggtggcttcgatagccctacagttgcctattctgtcctagtagtggcaaaagttgagaagggaaaatccaagaaactgaagtcagtcaaagaattattggggataacgattatggagcgctcgtcttttgaaaagaaccccatcgacttccttgaggcgaaaggttacaaggaagtaaaaaaggatctcataattaaactaccaaagtatagtctgtttgagttagaaaatggccgaaaacggatgttggctagcgccggagagcttcaaaaggggaacgaactcgcactaccgtctaaatacgtgaatttcctgtatttagcgtcccattacgagaagttgaaaggttcacctgaagataacgaacagaagcaactttttgttgagcagcacaaacattatctcgacgaaatcatagagcaaatttcggaattcagtaagagagtcatcctagctgatgccaatctggacaaagtattaagcgcatacaacaagcacagggataaacccatacgtgagcaggcggaaaatattatccatttgtttactcttaccaacctcggcgctccagccgcattcaagtattttgacacaacgatagatcgcaaacgatacacttctaccaaggaggtgctagacgcgacactgattcaccaatccatcacgggattatatgaaactcggatagatttgtcacagcttgggggtgacggatcccccaagaagaagaggaaagtctcgagcgactacaaagaccatgacggtgattataaagatcatgacatcgattacaaggatgacgatgacaaggctgcagga

SEQ ID NO: 201 - protein, 1368 aa, synthetic construct
  REGION 1..1368: note = exemplary catalytically active Cas9 nickase (nCas9) polypeptide sequence
MDKKYSIGLAIGTNSVGWAVITDEYKVPSKKFKVLGNTDRHSIKKNLIGALLFDSGETAEATRLKRTARRRYTRRKNRICYLQEIFSNEMAKVDDSFFHRLEESFLVEEDKKHERHPIFGNIVDEVAYHEKYPTIYHLRKKLVDSTDKADLRLIYLALAHMIKFRGHFLIEGDLNPDNSDVDKLFIQLVQTYNQLFEENPINASGVDAKAILSARLSKSRRLENLIAQLPGEKKNGLFGNLIALSLGLTPNFKSNFDLAEDAKLQLSKDTYDDDLDNLLAQIGDQYADLFLAAKNLSDAILLSDILRVNTEITKAPLSASMIKRYDEHHQDLTLLKALVRQQLPEKYKEIFFDQSKNGYAGYIDGGASQEEFYKFIKPILEKMDGTEELLVKLNREDLLRKQRTFDNGSIPHQIHLGELHAILRRQEDFYPFLKDNREKIEKILTFRIPYYVGPLARGNSRFAWMTRKSEETITPWNFEEVVDKGASAQSFIERMTNFDKNLPNEKVLPKHSLLYEYFTVYNELTKVKYVTEGMRKPAFLSGEQKKAIVDLLFKTNRKVTVKQLKEDYFKKIECFDSVEISGVEDRFNASLGTYHDLLKIIKDKDFLDNEENEDILEDIVLTLTLFEDREMIEERLKTYAHLFDDKVMKQLKRRRYTGWGRLSRKLINGIRDKQSGKTILDFLKSDGFANRNFMQLIHDDSLTFKEDIQKAQVSGQGDSLHEHIANLAGSPAIKKGILQTVKVVDELVKVMGRHKPENIVIEMARENQTTQKGQKNSRERMKRIEEGIKELGSQILKEHPVENTQLQNEKLYLYYLQNGRDMYVDQELDINRLSDYDVDHIVPQSFLKDDSIDNKVLTRSDKNRGKSDNVPSEEVVKKMKNYWRQLLNAKLITQRKFDNLTKAERGGLSELDKAGFIKRQLVETRQITKHVAQILDSRMNTKYDENDKLIREVKVITLKSKLVSDFRKDFQFYKVREINNYHHAHDAYLNAVVGTALIKKYPKLESEFVYGDYKVYDVRKMIAKSEQEIGKATAKYFFYSNIMNFFKTEITLANGEIRKRPLIETNGETGEIVWDKGRDFATVRKVLSMPQVNIVKKTEVQTGGFSKESILPKRNSDKLIARKKDWDPKKYGGFDSPTVAYSVLVVAKVEKGKSKKLKSVKELLGITIMERSSFEKNPIDFLEAKGYKEVKKDLIIKLPKYSLFELENGRKRMLASAGELQKGNELALPSKYVNFLYLASHYEKLKGSPEDNEQKQLFVEQHKHYLDEIIEQISEFSKRVILADANLDKVLSAYNKHRDKPIREQAENIIHLFTLTNLGAPAAFKYFDTTIDRKRYTSTKEVLDATLIHQSITGLYETRIDLSQLGGD

SEQ ID NO: 202 - DNA, 4107 bp, Streptococcus pyogenes
  misc_feature 1..4107: note = Cas9 from Streptococcus pyogenes (NCBI Ref. Seq.: NC_002737.2)polynucleotide sequence
  source 1..4107: mol_type = genomic DNA
atggataagaaatactcaataggcttagatatcggcacaaatagcgtcggatgggcggtgatcactgatgaatataaggttccgtctaaaaagttcaaggttctgggaaatacagaccgccacagtatcaaaaaaaatcttataggggctcttttatttgacagtggagagacagcggaagcgactcgtctcaaacggacagctcgtagaaggtatacacgtcggaagaatcgtatttgttatctacaggagattttttcaaatgagatggcgaaagtagatgatagtttctttcatcgacttgaagagtcttttttggtggaagaagacaagaagcatgaacgtcatcctatttttggaaatatagtagatgaagttgcttatcatgagaaatatccaactatctatcatctgcgaaaaaaattggtagattctactgataaagcggatttgcgcttaatctatttggccttagcgcatatgattaagtttcgtggtcattttttgattgagggagatttaaatcctgataatagtgatgtggacaaactatttatccagttggtacaaacctacaatcaattatttgaagaaaaccctattaacgcaagtggagtagatgctaaagcgattctttctgcacgattgagtaaatcaagacgattagaaaatctcattgctcagctccccggtgagaagaaaaatggcttatttgggaatctcattgctttgtcattgggtttgacccctaattttaaatcaaattttgatttggcagaagatgctaaattacagctttcaaaagatacttacgatgatgatttagataatttattggcgcaaattggagatcaatatgctgatttgtttttggcagctaagaatttatcagatgctattttactttcagatatcctaagagtaaatactgaaataactaaggctcccctatcagcttcaatgattaaacgctacgatgaacatcatcaagacttgactcttttaaaagctttagttcgacaacaacttccagaaaagtataaagaaatcttttttgatcaatcaaaaaacggatatgcaggttatattgatgggggagctagccaagaagaattttataaatttatcaaaccaattttagaaaaaatggatggtactgaggaattattggtgaaactaaatcgtgaagatttgctgcgcaagcaacggacctttgacaacggctctattccccatcaaattcacttgggtgagctgcatgctattttgagaagacaagaagacttttatccatttttaaaagacaatcgtgagaagattgaaaaaatcttgacttttcgaattccttattatgttggtccattggcgcgtggcaatagtcgttttgcatggatgactcggaagtctgaagaaacaattaccccatggaattttgaagaagttgtcgataaaggtgcttcagctcaatcatttattgaacgcatgacaaactttgataaaaatcttccaaatgaaaaagtactaccaaaacatagtttgctttatgagtattttacggtttataacgaattgacaaaggtcaaatatgttactgaaggaatgcgaaaaccagcatttctttcaggtgaacagaagaaagccattgttgatttactcttcaaaacaaatcgaaaagtaaccgttaagcaattaaaagaagattatttcaaaaaaatagaatgttttgatagtgttgaaatttcaggagttgaagatagatttaatgcttcattaggtacctaccatgatttgctaaaaattattaaagataaagattttttggataatgaagaaaatgaagatatcttagaggatattgttttaacattgaccttatttgaagatagggagatgattgaggaaagacttaaaacatatgctcacctctttgatgataaggtgatgaaacagcttaaacgtcgccgttatactggttggggacgtttgtctcgaaaattgattaatggtattagggataagcaatctggcaaaacaatattagattttttgaaatcagatggttttgccaatcgcaattttatgcagctgatccatgatgatagtttgacatttaaagaagacattcaaaaagcacaagtgtctggacaaggcgatagtttacatgaacatattgcaaatttagctggtagccctgctattaaaaaaggtattttacagactgtaaaagttgttgatgaattggtcaaagtaatggggcggcataagccagaaaatatcgttattgaaatggcacgtgaaaatcagacaactcaaaagggccagaaaaattcgcgagagcgtatgaaacgaatcgaagaaggtatcaaagaattaggaagtcagattcttaaagagcatcctgttgaaaatactcaattgcaaaatgaaaagctctatctctattatctccaaaatggaagagacatgtatgtggaccaagaattagatattaatcgtttaagtgattatgatgtcgatcacattgttccacaaagtttccttaaagacgattcaatagacaataaggtcttaacgcgttctgataaaaatcgtggtaaatcggataacgttccaagtgaagaagtagtcaaaaagatgaaaaactattggagacaacttctaaacgccaagttaatcactcaacgtaagtttgataatttaacgaaagctgaacgtggaggtttgagtgaacttgataaagctggttttatcaaacgccaattggttgaaactcgccaaatcactaagcatgtggcacaaattttggatagtcgcatgaatactaaatacgatgaaaatgataaacttattcgagaggttaaagtgattaccttaaaatctaaattagtttctgacttccgaaaagatttccaattctataaagtacgtgagattaacaattaccatcatgcccatgatgcgtatctaaatgccgtcgttggaactgctttgattaagaaatatccaaaacttgaatcggagtttgtctatggtgattataaagtttatgatgttcgtaaaatgattgctaagtctgagcaagaaataggcaaagcaaccgcaaaatatttcttttactctaatatcatgaacttcttcaaaacagaaattacacttgcaaatggagagattcgcaaacgccctctaatcgaaactaatggggaaactggagaaattgtctgggataaagggcgagattttgccacagtgcgcaaagtattgtccatgccccaagtcaatattgtcaagaaaacagaagtacagacaggcggattctccaaggagtcaattttaccaaaaagaaattcggacaagcttattgctcgtaaaaaagactgggatccaaaaaaatatggtggttttgatagtccaacggtagcttattcagtcctagtggttgctaaggtggaaaaagggaaatcgaagaagttaaaatccgttaaagagttactagggatcacaattatggaaagaagttcctttgaaaaaaatccgattgactttttagaagctaaaggatataaggaagttaaaaaagacttaatcattaaactacctaaatatagtctttttgagttagaaaacggtcgtaaacggatgctggctagtgccggagaattacaaaaaggaaatgagctggctctgccaagcaaatatgtgaattttttatatttagctagtcattatgaaaagttgaagggtagtccagaagataacgaacaaaaacaattgtttgtggagcagcataagcattatttagatgagattattgagcaaatcagtgaattttctaagcgtgttattttagcagatgccaatttagataaagttcttagtgcatataacaaacatagagacaaaccaatacgtgaacaagcagaaaatattattcatttatttacgttgacgaatcttggagctcccgctgcttttaaatattttgatacaacaattgatcgtaaacgatatacgtctacaaaagaagttttagatgccactcttatccatcaatccatcactggtctttatgaaacacgcattgatttgagtcagctaggaggtgactga

SEQ ID NO: 203 - protein, 1368 aa, synthetic construct
  REGION 1..1368: note = catalytically inactive Cas9 (dCas9)polypeptide sequence
  REGION 5..58: note = MISC_FEATURE - RuvC domain
  REGION 718..764: note = MISC_FEATURE - RuvC domain
  REGION 773..902: note = MISC_FEATURE - HNH domain
  REGION 907..1102: note = MISC_FEATURE - RuvC domain
MDKKYSIGLAIGTNSVGWAVITDEYKVPSKKFKVLGNTDRHSIKKNLIGALLFDSGETAEATRLKRTARRRYTRRKNRICYLQEIFSNEMAKVDDSFFHRLEESFLVEEDKKHERHPIFGNIVDEVAYHEKYPTIYHLRKKLVDSTDKADLRLIYLALAHMIKFRGHFLIEGDLNPDNSDVDKLFIQLVQTYNQLFEENPINASGVDAKAILSARLSKSRRLENLIAQLPGEKKNGLFGNLIALSLGLTPNFKSNFDLAEDAKLQLSKDTYDDDLDNLLAQIGDQYADLFLAAKNLSDAILLSDILRVNTEITKAPLSASMIKRYDEHHQDLTLLKALVRQQLPEKYKEIFFDQSKNGYAGYIDGGASQEEFYKFIKPILEKMDGTEELLVKLNREDLLRKQRTFDNGSIPHQIHLGELHAILRRQEDFYPFLKDNREKIEKILTFRIPYYVGPLARGNSRFAWMTRKSEETITPWNFEEVVDKGASAQSFIERMTNFDKNLPNEKVLPKHSLLYEYFTVYNELTKVKYVTEGMRKPAFLSGEQKKAIVDLLFKTNRKVTVKQLKEDYFKKIECFDSVEISGVEDRFNASLGTYHDLLKIIKDKDFLDNEENEDILEDIVLTLTLFEDREMIEERLKTYAHLFDDKVMKQLKRRRYTGWGRLSRKLINGIRDKQSGKTILDFLKSDGFANRNFMQLIHDDSLTFKEDIQKAQVSGQGDSLHEHIANLAGSPAIKKGILQTVKVVDELVKVMGRHKPENIVIEMARENQTTQKGQKNSRERMKRIEEGIKELGSQILKEHPVENTQLQNEKLYLYYLQNGRDMYVDQELDINRLSDYDVDAIVPQSFLKDDSIDNKVLTRSDKNRGKSDNVPSEEVVKKMKNYWRQLLNAKLITQRKFDNLTKAERGGLSELDKAGFIKRQLVETRQITKHVAQILDSRMNTKYDENDKLIREVKVITLKSKLVSDFRKDFQFYKVREINNYHHAHDAYLNAVVGTALIKKYPKLESEFVYGDYKVYDVRKMIAKSEQEIGKATAKYFFYSNIMNFFKTEITLANGEIRKRPLIETNGETGEIVWDKGRDFATVRKVLSMPQVNIVKKTEVQTGGFSKESILPKRNSDKLIARKKDWDPKKYGGFDSPTVAYSVLVVAKVEKGKSKKLKSVKELLGITIMERSSFEKNPIDFLEAKGYKEVKKDLIIKLPKYSLFELENGRKRMLASAGELQKGNELALPSKYVNFLYLASHYEKLKGSPEDNEQKQLFVEQHKHYLDEIIEQISEFSKRVILADANLDKVLSAYNKHRDKPIREQAENIIHLFTLTNLGAPAAFKYFDTTIDRKRYTSTKEVLDATLIHQSITGLYETRIDLSQLGGD

SEQ ID NO: 204 - protein, 345 aa, Sulfolobus islandicus
  REGION 1..345: note = MISC_FEATURE - tr|F0NN87|F0NN87_SULIHCRISPR-associatedCasx protein OS =Sulfolobus islandicus (strain HVE10/4) GN = SiH_0402 PE=4; SV = 1);CasX polypeptide sequence
MEVPLYNIFGDNYIIQVATEAENSTIYNNKVEIDDEELRNVLNLAYKIAKNNEDAAAERRGKAKKKKGEEGETTTSNIILPLSGNDKNPWTETLKCYNFPTTVALSEVFKNFSQVKECEEVSAPSFVKPEFYEFGRSPGMVERTRRVKLEVEPHYLIIAAAGWVLTRLGKAKVSEGDYVGVNVFTPTRGILYSLIQNVNGIVPGIKPETAFGLWIARKVVSSVTNPNVSVVRIYTISDAVGQNPTTINGGFSIDLTKLLEKRYLLSERLEAIARNALSISSNMRERYIVLANYIYEYLTGSKRLEDLLYFANRDLIMNLNSDDGKVRDLKLISAYVNGELIRGEG

SEQ ID NO: 205 - protein, 345 aa, Sulfolobus islandicus
  REGION 1..345: note = MISC_FEATURE - tr|F0NH53|F0NH53_SULIR CRISPR associated protein, Casx OS =Sulfolobus islandicus (strain REY15A) GN=SiRe_0771 PE=4 SV=1);CasX polypeptide sequence
MEVPLYNIFGDNYIIQVATEAENSTIYNNKVEIDDEELRNVLNLAYKIAKNNEDAAAERRGKAKKKKGEEGETTTSNIILPLSGNDKNPWTETLKCYNFPTTVALSEVFKNFSQVKECEEVSAPSFVKPEFYKFGRSPGMVERTRRVKLEVEPHYLIMAAAGWVLTRLGKAKVSEGDYVGVNVFTPTRGILYSLIQNVNGIVPGIKPETAFGLWIARKVVSSVTNPNVSVVSIYTISDAVGQNPTTINGGFSIDLTKLLEKRDLLSERLEAIARNALSISSNMRERYIVLANYIYEYLTGSKRLEDLLYFANRDLIMNLNSDDGKVRDLKLISAYVNGELIRGEG

SEQ ID NO: 206 - protein, 987 aa, unidentified
  REGION 1..987: note = MISC_FEATURE - CasX polypeptide sequence
MEKRINKIRKKLSADNATKPVSRSGPMKTLLVRVMTDDLKKRLEKRRKKPEVMPQVISNNAANNLRMLLDDYTKMKEAILQVYWQEFKDDHVGLMCKFAQPASKKIDQNKLKPEMDEKGNLTTAGFACSQCGQPLFVYKLEQVSEKGKAYTNYFGRCNVAEHEKLILLAQLKPVKDSDEAVTYSLGKFGQRALDFYSIHVTKESTHPVKPLAQIAGNRYASGPVGKALSDACMGTIASFLSKYQDIIIEHQKVVKGNQKRLESLRELAGKENLEYPSVTLPPQPHTKEGVDFAYNEVIARVRMWVNLNLWQKLKLSRDDAKPLLRLKGFPSFPVVERRENEVDWWNTINEVKKLIDAKRDMGRVFWSGVTAEKRNTILEGYNYLPNENDHKKREGSLENPKKPAKRQFGDLLLYLEKKYAGDWGKVFDEAWERIDKKIAGLTSHIEREEARNAEDAQSKAVLTDWLRAKASFVLERLKEMDEKEFYACEIQLQKWYGDLRGNPFAVEAENRVVDISGFSIGSDGHSIQYRNLLAWKYLENGKREFYLLMNYGKKGRIRFTDGTDIKKSGKWQGLLYGGGKAKVIDLTFDPDDEQLIILPLAFGTRQGREFIWNDLLSLETGLIKLANGRVIEKTIYNKKIGRDEPALFVALTFERREVVDPSNIKPVNLIGVARGENIPAVIALTDPEGCPLPEFKDSSGGPTDILRIGEGYKEKQRAIQAAKEVEQRRAGGYSRKFASKSRNLADDMVRNSARDLFYHAVTHDAVLVFANLSRGFGRQGKRTFMTERQYTKMEDWLTAKLAYEGLTSKTYLSKTLAQYTSKTCSNCGFTITYADMDVMLVRLKKTSDGWATTLNNKELKAEYQITYYNRYKRQTVEKELSAELDRLSEESGNNDISKWTKGRRDEALFLLKKRFSHRPVQEQFVCLDCGHEVHAAEQAALNIARSWLFLNSNSTEFKSYKSGKQPFVGAWQAFYKRRLKEVWKPNA

SEQ ID NO: 207 - protein, 1210 aa, unidentified
  REGION 1..1210: note = MISC_FEATURE - APG80656.1 CRISPR-associated protein CasY [uncultured Parcubacteria group bacterium]; CasY polypeptide sequence
MSKRHPRISGVKGYRLHAQRLEYTGKSGAMRTIKYPLYSSPSGGRTVPREIVSAINDDYVGLYGLSNFDDLYNAEKRNEEKVYSVLDFWYDCVQYGAVFSYTAPGLLKNVAEVRGGSYELTKTLKGSHLYDELQIDKVIKFLNKKEISRANGSLDKLKKDIIDCFKAEYRERHKDQCNKLADDIKNAKKDAGASLGERQKKLFRDFFGISEQSENDKPSFTNPLNLTCCLLPFDTVNNNRNRGEVLFNKLKEYAQKLDKNEGSLEMWEYIGIGNSGTAFSNFLGEGFLGRLRENKITELKKAMMDITDAWRGQEQEEELEKRLRILAALTIKLREPKFDNHWGGYRSDINGKLSSWLQNYINQTVKIKEDLKGHKKDLKKAKEMINRFGESDTKEEAVVSSLLESIEKIVPDDSADDEKPDIPAIAIYRRFLSDGRLTLNRFVQREDVQEALIKERLEAEKKKKPKKRKKKSDAEDEKETIDFKELFPHLAKPLKLVPNFYGDSKRELYKKYKNAAIYTDALWKAVEKIYKSAFSSSLKNSFFDTDFDKDFFIKRLQKIFSVYRRFNTDKWKPIVKNSFAPYCDIVSLAENEVLYKPKQSRSRKSAAIDKNRVRLPSTENIAKAGIALARELSVAGFDWKDLLKKEEHEEYIDLIELHKTALALLLAVTETQLDISALDFVENGTVKDFMKTRDGNLVLEGRFLEMFSQSIVFSELRGLAGLMSRKEFITRSAIQTMNGKQAELLYIPHEFQSAKITTPKEMSRAFLDLAPAEFATSLEPESLSEKSLLKLKQMRYYPHYFGYELTRTGQGIDGGVAENALRLEKSPVKKREIKCKQYKTLGRGQNKIVLYVRSSYYQTQFLEWFLHRPKNVQTDVAVSGSFLIDEKKVKTRWNYDALTVALEPVSGSERVFVSQPFTIFPEKSAEEEGQRYLGIDIGEYGIAYTALEITGDSAKILDQNFISDPQLKTLREEVKGLKLDQRRGTFAMPSTKIARIRESLVHSLRNRIHHLALKHKAKIVYELEVSRFEEGKQKIKKVYATLKKADVYSEIDADKNLQTTVWGKLAVASEISASYTSQFCGACKKLWRAEMQVDETITTQELIGTVRVIKGGTLIDAIKDFMRPPIFDENDTPFPKYRDFCDKHHISKKMRGNSCLFICPFCRANADADIQASQTIALLRYVKEEKKVEDYFERFRKLKNIKVLGQMKKI

SEQ ID NO: 208 - protein, 1082 aa, Neisseria meningitidis
  REGION 1..1082: note = MISC_FEATURE - NCBI Reference: WP_002235162.1; type II CRISPR RNA-guided endonuclease Cas9; Nme1Cas9 polypeptide sequence
MAAFKPNPINYILGLDIGIASVGWAMVEIDEDENPICLIDLGVRVFERAEVPKTGDSLAMARRLARSVRRLTRRRAHRLLRARRLLKREGVLQAADFDENGLIKSLPNTPWQLRAAALDRKLTPLEWSAVLLHLIKHRGYLSQRKNEGETADKELGALLKGVADNAHALQTGDFRTPAELALNKFEKESGHIRNQRGDYSHTFSRKDLQAELILLFEKQKEFGNPHVSGGLKEGIETLLMTQRPALSGDAVQKMLGHCTFEPAEPKAAKNTYTAERFIWLTKLNNLRILEQGSERPLTDTERATLMDEPYRKSKLTYAQARKLLGLEDTAFFKGLRYGKDNAEASTLMEMKAYHAISRALEKEGLKDKKSPLNLSPELQDEIGTAFSLFKTDEDITGRLKDRIQPEILEALLKHISFDKFVQISLKALRRIVPLMEQGKRYDEACAEIYGDHYGKKNTEEKIYLPPIPADEIRNPVVLRALSQARKVINGVVRRYGSPARIHIETAREVGKSFKDRKEIEKRQEENRKDREKAAAKFREYFPNFVGEPKSKDILKLRLYEQQHGKCLYSGKEINLGRLNEKGYVEIDHALPFSRTWDDSFNNKVLVLGSENQNKGNQTPYEYFNGKDNSREWQEFKARVETSRFPRSKKQRILLQKFDEDGFKERNLNDTRYVNRFLCQFVADRMRLTGKGKKRVFASNGQITNLLRGFWGLRKVRAENDRHHALDAVVVACSTVAMQQKITRFVRYKEMNAFDGKTIDKETGEVLHQKTHFPQPWEFFAQEVMIRVFGKPDGKPEFEEADTPEKLRTLLAEKLSSRPEAVHEYVTPLFVSRAPNRKMSGQGHMETVKSAKRLDEGVSVLRVPLTQLKLKDLEKMVNREREPKLYEALKARLEAHKDDPAKAFAEPFYKYDKAGNRTQQVKAVRVEQVQKTGVWVRNHNGIADNATMVRVDVFEKGDKYYLVPIYSWQVAKGILPDRAVVQGKDEEDWQLIDDSFNFKFSLHPNDLVEVITKKARMFGYFASCHRGTGNINIRIHDLDHKIGKNGILEGIGVKTALSFQKYQIDELGKEIRPCRLKKRPPVR

SEQ ID NO: 209 - protein, 1082 aa, Neisseria meningitidis
  REGION 1..1082: note = MISC_FEATURE - NCBI Reference: WP_002230835; type II CRISPR RNA-guided endonuclease Cas9; Nme2Cas9 polypeptide sequence
MAAFKPNPINYILGLDIGIASVGWAMVEIDEEENPIRLIDLGVRVFERAEVPKTGDSLAMARRLARSVRRLTRRRAHRLLRARRLLKREGVLQAADFDENGLIKSLPNTPWQLRAAALDRKLTPLEWSAVLLHLIKHRGYLSQRKNEGETADKELGALLKGVANNAHALQTGDFRTPAELALNKFEKESGHIRNQRGDYSHTFSRKDLQAELILLFEKQKEFGNPHVSGGLKEGIETLLMTQRPALSGDAVQKMLGHCTFEPAEPKAAKNTYTAERFIWLTKLNNLRILEQGSERPLTDTERATLMDEPYRKSKLTYAQARKLLGLEDTAFFKGLRYGKDNAEASTLMEMKAYHAISRALEKEGLKDKKSPLNLSSELQDEIGTAFSLFKTDEDITGRLKDRVQPEILEALLKHISFDKFVQISLKALRRIVPLMEQGKRYDEACAEIYGDHYGKKNTEEKIYLPPIPADEIRNPVVLRALSQARKVINGVVRRYGSPARIHIETAREVGKSFKDRKEIEKRQEENRKDREKAAAKFREYFPNFVGEPKSKDILKLRLYEQQHGKCLYSGKEINLVRLNEKGYVEIDHALPFSRTWDDSFNNKVLVLGSENQNKGNQTPYEYFNGKDNSREWQEFKARVETSRFPRSKKQRILLQKFDEDGFKECNLNDTRYVNRFLCQFVADHILLTGKGKRRVFASNGQITNLLRGFWGLRKVRAENDRHHALDAVVVACSTVAMQQKITRFVRYKEMNAFDGKTIDKETGKVLHQKTHFPQPWEFFAQEVMIRVFGKPDGKPEFEEADTPEKLRTLLAEKLSSRPEAVHEYVTPLFVSRAPNRKMSGAHKDTLRSAKRFVKHNEKISVKRVWLTEIKLADLENMVNYKNGREIELYEALKARLEAYGGNAKQAFDPKDNPFYKKGGQLVKAVRVEKTQESGVLLNKKNAYTIADNGDMVRVDVFCKVDKKGKNQYFIVPIYAWQVAENILPDIDCKGYRIDDSYTFCFSLHKYDLIAFQKDEKSKVEFAYYINCDSSNGRFYLAWHDKGSKEQQFRISTQNLVLIQKYQVNELGKEIRPCRLKKRPPVR

SEQ ID NO: 210 - protein, 1300 aa, Francisella tularensis
  REGION 1..1300: note = MISC_FEATURE - wild type Cpf1 polypeptide sequence
  source 1..1300: note = subspecies novicida
MSIYQEFVNKYSLSKTLRFELIPQGKTLENIKARGLILDDEKRAKDYKKAKQIIDKYHQFFIEEILSSVCISEDLLQNYSDVYFKLKKSDDDNLQKDFKSAKDTIKKQISEYIKDSEKFKNLFNQNLIDAKKGQESDLILWLKQSKDNGIELFKANSDITDIDEALEIIKSFKGWTTYFKGFHENRKNVYSSNDIPTSIIYRIVDDNLPKFLENKAKYESLKDKAPEAINYEQIKKDLAEELTFDIDYKTSEVNQRVFSLDEVFEIANFNNYLNQSGITKFNTIIGGKFVNGENTKRKGINEYINLYSQQINDKTLKKYKMSVLFKQILSDTESKSFVIDKLEDDSDVVTTMQSFYEQIAAFKTVEEKSIKETLSLLFDDLKAQKLDLSKIYFKNDKSLTDLSQQVFDDYSVIGTAVLEYITQQIAPKNLDNPSKKEQELIAKKTEKAKYLSLETIKLALEEFNKHRDIDKQCRFEEILANFAAIPMIFDEIAQNKDNLAQISIKYQNQGKKDLLQASAEDDVKAIKDLLDQTNNLLHKLKIFHISQSEDKANILDKDEHFYLVFEECYFELANIVPLYNKIRNYITQKPYSDEKFKLNFENSTLANGWDKNKEPDNTAILFIKDDKYYLGVMNKKNNKIFDDKAIKENKGEGYKKIVYKLLPGANKMLPKVFFSAKSIKFYNPSEDILRIRNHSTHTKNGSPQKGYEKFEFNIEDCRKFIDFYKQSISKHPEWKDFGFRFSDTQRYNSIDEFYREVENQGYKLTFENISESYIDSVVNQGKLYLFQIYNKDFSAYSKGRPNLHTLYWKALFDERNLQDVVYKLNGEAELFYRKQSIPKKITHPAKEAIANKNKDNPKKESVFEYDLIKDKRFTEDKFFFHCPITINFKSSGANKFNDEINLLLKEKANDVHILSIDRGERHLAYYTLVDGKGNIIKQDTFNIIGNDRMKTNYHDKLAAIEKDRDSARKDWKKINNIKEMKEGYLSQVVHEIAKLVIEYNAIVVFEDLNFGFKRGRFKVEKQVYQKLEKMLIEKLNYLVFKDNEFDKTGGVLRAYQLTAPFETFKKMGKQTGIIYYVPAGFTSKICPVTGFVNQLYPKYESVSKSQEFFSKFDKICYNLDKGYFEFSFDYKNFGDKAAKGKWTIASFGSRLINFRNSDKNHNWDTREVYPTKELEKLLKDYSIEYGHGECIKAAICGESDKKFFAKLTSVLNTILQMRNSKTGTELDYLISPVADVNGNFFDSRQAPKNMPQDADANGAYHIGLKGLMLLGRIKNNQEGKKLNLVIKNEEYFEFVQNRNN

SEQ ID NO: 211 - protein, 1300 aa, Francisella tularensis
  REGION 1..1300: note = MISC_FEATURE - Cpf1 D917A polypeptide sequence
  source 1..1300: note = subspecies novicida
MSIYQEFVNKYSLSKTLRFELIPQGKTLENIKARGLILDDEKRAKDYKKAKQIIDKYHQFFIEEILSSVCISEDLLQNYSDVYFKLKKSDDDNLQKDFKSAKDTIKKQISEYIKDSEKFKNLFNQNLIDAKKGQESDLILWLKQSKDNGIELFKANSDITDIDEALEIIKSFKGWTTYFKGFHENRKNVYSSNDIPTSIIYRIVDDNLPKFLENKAKYESLKDKAPEAINYEQIKKDLAEELTFDIDYKTSEVNQRVFSLDEVFEIANFNNYLNQSGITKFNTIIGGKFVNGENTKRKGINEYINLYSQQINDKTLKKYKMSVLFKQILSDTESKSFVIDKLEDDSDVVTTMQSFYEQIAAFKTVEEKSIKETLSLLFDDLKAQKLDLSKIYFKNDKSLTDLSQQVFDDYSVIGTAVLEYITQQIAPKNLDNPSKKEQELIAKKTEKAKYLSLETIKLALEEFNKHRDIDKQCRFEEILANFAAIPMIFDEIAQNKDNLAQISIKYQNQGKKDLLQASAEDDVKAIKDLLDQTNNLLHKLKIFHISQSEDKANILDKDEHFYLVFEECYFELANIVPLYNKIRNYITQKPYSDEKFKLNFENSTLANGWDKNKEPDNTAILFIKDDKYYLGVMNKKNNKIFDDKAIKENKGEGYKKIVYKLLPGANKMLPKVFFSAKSIKFYNPSEDILRIRNHSTHTKNGSPQKGYEKFEFNIEDCRKFIDFYKQSISKHPEWKDFGFRFSDTQRYNSIDEFYREVENQGYKLTFENISESYIDSVVNQGKLYLFQIYNKDFSAYSKGRPNLHTLYWKALFDERNLQDVVYKLNGEAELFYRKQSIPKKITHPAKEAIANKNKDNPKKESVFEYDLIKDKRFTEDKFFFHCPITINFKSSGANKFNDEINLLLKEKANDVHILSIARGERHLAYYTLVDGKGNIIKQDTFNIIGNDRMKTNYHDKLAAIEKDRDSARKDWKKINNIKEMKEGYLSQVVHEIAKLVIEYNAIVVFEDLNFGFKRGRFKVEKQVYQKLEKMLIEKLNYLVFKDNEFDKTGGVLRAYQLTAPFETFKKMGKQTGIIYYVPAGFTSKICPVTGFVNQLYPKYESVSKSQEFFSKFDKICYNLDKGYFEFSFDYKNFGDKAAKGKWTIASFGSRLINFRNSDKNHNWDTREVYPTKELEKLLKDYSIEYGHGECIKAAICGESDKKFFAKLTSVLNTILQMRNSKTGTELDYLISPVADVNGNFFDSRQAPKNMPQDADANGAYHIGLKGLMLLGRIKNNQEGKKLNLVIKNEEYFEFVQNRNN

SEQ ID NO: 212 - protein, 1300 aa, Francisella tularensis
  REGION 1..1300: note = MISC_FEATURE - Cpf1 E1006A polypeptide sequence
  source 1..1300: note = subspecies novicida
MSIYQEFVNKYSLSKTLRFELIPQGKTLENIKARGLILDDEKRAKDYKKAKQIIDKYHQFFIEEILSSVCISEDLLQNYSDVYFKLKKSDDDNLQKDFKSAKDTIKKQISEYIKDSEKFKNLFNQNLIDAKKGQESDLILWLKQSKDNGIELFKANSDITDIDEALEIIKSFKGWTTYFKGFHENRKNVYSSNDIPTSIIYRIVDDNLPKFLENKAKYESLKDKAPEAINYEQIKKDLAEELTFDIDYKTSEVNQRVFSLDEVFEIANFNNYLNQSGITKFNTIIGGKFVNGENTKRKGINEYINLYSQQINDKTLKKYKMSVLFKQILSDTESKSFVIDKLEDDSDVVTTMQSFYEQIAAFKTVEEKSIKETLSLLFDDLKAQKLDLSKIYFKNDKSLTDLSQQVFDDYSVIGTAVLEYITQQIAPKNLDNPSKKEQELIAKKTEKAKYLSLETIKLALEEFNKHRDIDKQCRFEEILANFAAIPMIFDEIAQNKDNLAQISIKYQNQGKKDLLQASAEDDVKAIKDLLDQTNNLLHKLKIFHISQSEDKANILDKDEHFYLVFEECYFELANIVPLYNKIRNYITQKPYSDEKFKLNFENSTLANGWDKNKEPDNTAILFIKDDKYYLGVMNKKNNKIFDDKAIKENKGEGYKKIVYKLLPGANKMLPKVFFSAKSIKFYNPSEDILRIRNHSTHTKNGSPQKGYEKFEFNIEDCRKFIDFYKQSISKHPEWKDFGFRFSDTQRYNSIDEFYREVENQGYKLTFENISESYIDSVVNQGKLYLFQIYNKDFSAYSKGRPNLHTLYWKALFDERNLQDVVYKLNGEAELFYRKQSIPKKITHPAKEAIANKNKDNPKKESVFEYDLIKDKRFTEDKFFFHCPITINFKSSGANKFNDEINLLLKEKANDVHILSIDRGERHLAYYTLVDGKGNIIKQDTFNIIGNDRMKTNYHDKLAAIEKDRDSARKDWKKINNIKEMKEGYLSQVVHEIAKLVIEYNAIVVFADLNFGFKRGRFKVEKQVYQKLEKMLIEKLNYLVFKDNEFDKTGGVLRAYQLTAPFETFKKMGKQTGIIYYVPAGFTSKICPVTGFVNQLYPKYESVSKSQEFFSKFDKICYNLDKGYFEFSFDYKNFGDKAAKGKWTIASFGSRLINFRNSDKNHNWDTREVYPTKELEKLLKDYSIEYGHGECIKAAICGESDKKFFAKLTSVLNTILQMRNSKTGTELDYLISPVADVNGNFFDSRQAPKNMPQDADANGAYHIGLKGLMLLGRIKNNQEGKKLNLVIKNEEYFEFVQNRNN

SEQ ID NO: 213 - protein, 1300 aa, Francisella tularensis
  REGION 1..1300: note = MISC_FEATURE - Cpf1 D1255A polypeptide sequence
  source 1..1300: note = subspecies novicida
MSIYQEFVNKYSLSKTLRFELIPQGKTLENIKARGLILDDEKRAKDYKKAKQIIDKYHQFFIEEILSSVCISEDLLQNYSDVYFKLKKSDDDNLQKDFKSAKDTIKKQISEYIKDSEKFKNLFNQNLIDAKKGQESDLILWLKQSKDNGIELFKANSDITDIDEALEIIKSFKGWTTYFKGFHENRKNVYSSNDIPTSIIYRIVDDNLPKFLENKAKYESLKDKAPEAINYEQIKKDLAEELTFDIDYKTSEVNQRVFSLDEVFEIANFNNYLNQSGITKFNTIIGGKFVNGENTKRKGINEYINLYSQQINDKTLKKYKMSVLFKQILSDTESKSFVIDKLEDDSDVVTTMQSFYEQIAAFKTVEEKSIKETLSLLFDDLKAQKLDLSKIYFKNDKSLTDLSQQVFDDYSVIGTAVLEYITQQIAPKNLDNPSKKEQELIAKKTEKAKYLSLETIKLALEEFNKHRDIDKQCRFEEILANFAAIPMIFDEIAQNKDNLAQISIKYQNQGKKDLLQASAEDDVKAIKDLLDQTNNLLHKLKIFHISQSEDKANILDKDEHFYLVFEECYFELANIVPLYNKIRNYITQKPYSDEKFKLNFENSTLANGWDKNKEPDNTAILFIKDDKYYLGVMNKKNNKIFDDKAIKENKGEGYKKIVYKLLPGANKMLPKVFFSAKSIKFYNPSEDILRIRNHSTHTKNGSPQKGYEKFEFNIEDCRKFIDFYKQSISKHPEWKDFGFRFSDTQRYNSIDEFYREVENQGYKLTFENISESYIDSVVNQGKLYLFQIYNKDFSAYSKGRPNLHTLYWKALFDERNLQDVVYKLNGEAELFYRKQSIPKKITHPAKEAIANKNKDNPKKESVFEYDLIKDKRFTEDKFFFHCPITINFKSSGANKFNDEINLLLKEKANDVHILSIDRGERHLAYYTLVDGKGNIIKQDTFNIIGNDRMKTNYHDKLAAIEKDRDSARKDWKKINNIKEMKEGYLSQVVHEIAKLVIEYNAIVVFEDLNFGFKRGRFKVEKQVYQKLEKMLIEKLNYLVFKDNEFDKTGGVLRAYQLTAPFETFKKMGKQTGIIYYVPAGFTSKICPVTGFVNQLYPKYESVSKSQEFFSKFDKICYNLDKGYFEFSFDYKNFGDKAAKGKWTIASFGSRLINFRNSDKNHNWDTREVYPTKELEKLLKDYSIEYGHGECIKAAICGESDKKFFAKLTSVLNTILQMRNSKTGTELDYLISPVADVNGNFFDSRQAPKNMPQDAAANGAYHIGLKGLMLLGRIKNNQEGKKLNLVIKNEEYFEFVQNRNN

SEQ ID NO: 214 - protein, 1300 aa, Francisella tularensis
  REGION 1..1300: note = MISC_FEATURE - Cpf1 D917A/E1006A polypeptide sequence
  source 1..1300: note = subspecies novicida
MSIYQEFVNKYSLSKTLRFELIPQGKTLENIKARGLILDDEKRAKDYKKAKQIIDKYHQFFIEEILSSVCISEDLLQNYSDVYFKLKKSDDDNLQKDFKSAKDTIKKQISEYIKDSEKFKNLFNQNLIDAKKGQESDLILWLKQSKDNGIELFKANSDITDIDEALEIIKSFKGWTTYFKGFHENRKNVYSSNDIPTSIIYRIVDDNLPKFLENKAKYESLKDKAPEAINYEQIKKDLAEELTFDIDYKTSEVNQRVFSLDEVFEIANFNNYLNQSGITKFNTIIGGKFVNGENTKRKGINEYINLYSQQINDKTLKKYKMSVLFKQILSDTESKSFVIDKLEDDSDVVTTMQSFYEQIAAFKTVEEKSIKETLSLLFDDLKAQKLDLSKIYFKNDKSLTDLSQQVFDDYSVIGTAVLEYITQQIAPKNLDNPSKKEQELIAKKTEKAKYLSLETIKLALEEFNKHRDIDKQCRFEEILANFAAIPMIFDEIAQNKDNLAQISIKYQNQGKKDLLQASAEDDVKAIKDLLDQTNNLLHKLKIFHISQSEDKANILDKDEHFYLVFEECYFELANIVPLYNKIRNYITQKPYSDEKFKLNFENSTLANGWDKNKEPDNTAILFIKDDKYYLGVMNKKNNKIFDDKAIKENKGEGYKKIVYKLLPGANKMLPKVFFSAKSIKFYNPSEDILRIRNHSTHTKNGSPQKGYEKFEFNIEDCRKFIDFYKQSISKHPEWKDFGFRFSDTQRYNSIDEFYREVENQGYKLTFENISESYIDSVVNQGKLYLFQIYNKDFSAYSKGRPNLHTLYWKALFDERNLQDVVYKLNGEAELFYRKQSIPKKITHPAKEAIANKNKDNPKKESVFEYDLIKDKRFTEDKFFFHCPITINFKSSGANKFNDEINLLLKEKANDVHILSIARGERHLAYYTLVDGKGNIIKQDTFNIIGNDRMKTNYHDKLAAIEKDRDSARKDWKKINNIKEMKEGYLSQVVHEIAKLVIEYNAIVVFADLNFGFKRGRFKVEKQVYQKLEKMLIEKLNYLVFKDNEFDKTGGVLRAYQLTAPFETFKKMGKQTGIIYYVPAGFTSKICPVTGFVNQLYPKYESVSKSQEFFSKFDKICYNLDKGYFEFSFDYKNFGDKAAKGKWTIASFGSRLINFRNSDKNHNWDTREVYPTKELEKLLKDYSIEYGHGECIKAAICGESDKKFFAKLTSVLNTILQMRNSKTGTELDYLISPVADVNGNFFDSRQAPKNMPQDADANGAYHIGLKGLMLLGRIKNNQEGKKLNLVIKNEEYFEFVQNRNN

SEQ ID NO: 215 - protein, 1300 aa, Francisella tularensis
  REGION 1..1300: note = MISC_FEATURE - Cpf1 D917A/D1255A polypeptide sequence
  source 1..1300: note = subspecies novicida
MSIYQEFVNKYSLSKTLRFELIPQGKTLENIKARGLILDDEKRAKDYKKAKQIIDKYHQFFIEEILSSVCISEDLLQNYSDVYFKLKKSDDDNLQKDFKSAKDTIKKQISEYIKDSEKFKNLFNQNLIDAKKGQESDLILWLKQSKDNGIELFKANSDITDIDEALEIIKSFKGWTTYFKGFHENRKNVYSSNDIPTSIIYRIVDDNLPKFLENKAKYESLKDKAPEAINYEQIKKDLAEELTFDIDYKTSEVNQRVFSLDEVFEIANFNNYLNQSGITKFNTIIGGKFVNGENTKRKGINEYINLYSQQINDKTLKKYKMSVLFKQILSDTESKSFVIDKLEDDSDVVTTMQSFYEQIAAFKTVEEKSIKETLSLLFDDLKAQKLDLSKIYFKNDKSLTDLSQQVFDDYSVIGTAVLEYITQQIAPKNLDNPSKKEQELIAKKTEKAKYLSLETIKLALEEFNKHRDIDKQCRFEEILANFAAIPMIFDEIAQNKDNLAQISIKYQNQGKKDLLQASAEDDVKAIKDLLDQTNNLLHKLKIFHISQSEDKANILDKDEHFYLVFEECYFELANIVPLYNKIRNYITQKPYSDEKFKLNFENSTLANGWDKNKEPDNTAILFIKDDKYYLGVMNKKNNKIFDDKAIKENKGEGYKKIVYKLLPGANKMLPKVFFSAKSIKFYNPSEDILRIRNHSTHTKNGSPQKGYEKFEFNIEDCRKFIDFYKQSISKHPEWKDFGFRFSDTQRYNSIDEFYREVENQGYKLTFENISESYIDSVVNQGKLYLFQIYNKDFSAYSKGRPNLHTLYWKALFDERNLQDVVYKLNGEAELFYRKQSIPKKITHPAKEAIANKNKDNPKKESVFEYDLIKDKRFTEDKFFFHCPITINFKSSGANKFNDEINLLLKEKANDVHILSIARGERHLAYYTLVDGKGNIIKQDTFNIIGNDRMKTNYHDKLAAIEKDRDSARKDWKKINNIKEMKEGYLSQVVHEIAKLVIEYNAIVVFEDLNFGFKRGRFKVEKQVYQKLEKMLIEKLNYLVFKDNEFDKTGGVLRAYQLTAPFETFKKMGKQTGIIYYVPAGFTSKICPVTGFVNQLYPKYESVSKSQEFFSKFDKICYNLDKGYFEFSFDYKNFGDKAAKGKWTIASFGSRLINFRNSDKNHNWDTREVYPTKELEKLLKDYSIEYGHGECIKAAICGESDKKFFAKLTSVLNTILQMRNSKTGTELDYLISPVADVNGNFFDSRQAPKNMPQDAAANGAYHIGLKGLMLLGRIKNNQEGKKLNLVIKNEEYFEFVQNRNN

SEQ ID NO: 216 - protein, 1300 aa, Francisella tularensis
  REGION 1..1300: note = MISC_FEATURE - Cpf1 E1006A/D1255A polypeptide sequence
  source 1..1300: note = subspecies novicida
MSIYQEFVNKYSLSKTLRFELIPQGKTLENIKARGLILDDEKRAKDYKKAKQIIDKYHQFFIEEILSSVCISEDLLQNYSDVYFKLKKSDDDNLQKDFKSAKDTIKKQISEYIKDSEKFKNLFNQNLIDAKKGQESDLILWLKQSKDNGIELFKANSDITDIDEALEIIKSFKGWTTYFKGFHENRKNVYSSNDIPTSIIYRIVDDNLPKFLENKAKYESLKDKAPEAINYEQIKKDLAEELTFDIDYKTSEVNQRVFSLDEVFEIANFNNYLNQSGITKFNTIIGGKFVNGENTKRKGINEYINLYSQQINDKTLKKYKMSVLFKQILSDTESKSFVIDKLEDDSDVVTTMQSFYEQIAAFKTVEEKSIKETLSLLFDDLKAQKLDLSKIYFKNDKSLTDLSQQVFDDYSVIGTAVLEYITQQIAPKNLDNPSKKEQELIAKKTEKAKYLSLETIKLALEEFNKHRDIDKQCRFEEILANFAAIPMIFDEIAQNKDNLAQISIKYQNQGKKDLLQASAEDDVKAIKDLLDQTNNLLHKLKIFHISQSEDKANILDKDEHFYLVFEECYFELANIVPLYNKIRNYITQKPYSDEKFKLNFENSTLANGWDKNKEPDNTAILFIKDDKYYLGVMNKKNNKIFDDKAIKENKGEGYKKIVYKLLPGANKMLPKVFFSAKSIKFYNPSEDILRIRNHSTHTKNGSPQKGYEKFEFNIEDCRKFIDFYKQSISKHPEWKDFGFRFSDTQRYNSIDEFYREVENQGYKLTFENISESYIDSVVNQGKLYLFQIYNKDFSAYSKGRPNLHTLYWKALFDERNLQDVVYKLNGEAELFYRKQSIPKKITHPAKEAIANKNKDNPKKESVFEYDLIKDKRFTEDKFFFHCPITINFKSSGANKFNDEINLLLKEKANDVHILSIDRGERHLAYYTLVDGKGNIIKQDTFNIIGNDRMKTNYHDKLAAIEKDRDSARKDWKKINNIKEMKEGYLSQVVHEIAKLVIEYNAIVVFADLNFGFKRGRFKVEKQVYQKLEKMLIEKLNYLVFKDNEFDKTGGVLRAYQLTAPFETFKKMGKQTGIIYYVPAGFTSKICPVTGFVNQLYPKYESVSKSQEFFSKFDKICYNLDKGYFEFSFDYKNFGDKAAKGKWTIASFGSRLINFRNSDKNHNWDTREVYPTKELEKLLKDYSIEYGHGECIKAAICGESDKKFFAKLTSVLNTILQMRNSKTGTELDYLISPVADVNGNFFDSRQAPKNMPQDAAANGAYHIGLKGLMLLGRIKNNQEGKKLNLVIKNEEYFEFVQNRNN

SEQ ID NO: 217 - protein, 1300 aa, Francisella tularensis
  REGION 1..1300: note = MISC_FEATURE - Cpf1 D917A/E1006A/D1255A polypeptide sequence
  source 1..1300: note = subspecies novicida
MSIYQEFVNKYSLSKTLRFELIPQGKTLENIKARGLILDDEKRAKDYKKAKQIIDKYHQFFIEEILSSVCISEDLLQNYSDVYFKLKKSDDDNLQKDFKSAKDTIKKQISEYIKDSEKFKNLFNQNLIDAKKGQESDLILWLKQSKDNGIELFKANSDITDIDEALEIIKSFKGWTTYFKGFHENRKNVYSSNDIPTSIIYRIVDDNLPKFLENKAKYESLKDKAPEAINYEQIKKDLAEELTFDIDYKTSEVNQRVFSLDEVFEIANFNNYLNQSGITKFNTIIGGKFVNGENTKRKGINEYINLYSQQINDKTLKKYKMSVLFKQILSDTESKSFVIDKLEDDSDVVTTMQSFYEQIAAFKTVEEKSIKETLSLLFDDLKAQKLDLSKIYFKNDKSLTDLSQQVFDDYSVIGTAVLEYITQQIAPKNLDNPSKKEQELIAKKTEKAKYLSLETIKLALEEFNKHRDIDKQCRFEEILANFAAIPMIFDEIAQNKDNLAQISIKYQNQGKKDLLQASAEDDVKAIKDLLDQTNNLLHKLKIFHISQSEDKANILDKDEHFYLVFEECYFELANIVPLYNKIRNYITQKPYSDEKFKLNFENSTLANGWDKNKEPDNTAILFIKDDKYYLGVMNKKNNKIFDDKAIKENKGEGYKKIVYKLLPGANKMLPKVFFSAKSIKFYNPSEDILRIRNHSTHTKNGSPQKGYEKFEFNIEDCRKFIDFYKQSISKHPEWKDFGFRFSDTQRYNSIDEFYREVENQGYKLTFENISESYIDSVVNQGKLYLFQIYNKDFSAYSKGRPNLHTLYWKALFDERNLQDVVYKLNGEAELFYRKQSIPKKITHPAKEAIANKNKDNPKKESVFEYDLIKDKRFTEDKFFFHCPITINFKSSGANKFNDEINLLLKEKANDVHILSIARGERHLAYYTLVDGKGNIIKQDTFNIIGNDRMKTNYHDKLAAIEKDRDSARKDWKKINNIKEMKEGYLSQVVHEIAKLVIEYNAIVVFADLNFGFKRGRFKVEKQVYQKLEKMLIEKLNYLVFKDNEFDKTGGVLRAYQLTAPFETFKKMGKQTGIIYYVPAGFTSKICPVTGFVNQLYPKYESVSKSQEFFSKFDKICYNLDKGYFEFSFDYKNFGDKAAKGKWTIASFGSRLINFRNSDKNHNWDTREVYPTKELEKLLKDYSIEYGHGECIKAAICGESDKKFFAKLTSVLNTILQMRNSKTGTELDYLISPVADVNGNFFDSRQAPKNMPQDAAANGAYHIGLKGLMLLGRIKNNQEGKKLNLVIKNEEYFEFVQNRNN

SEQ ID NO: 218 - protein, 1052 aa, Staphylococcus aureus
  REGION 1..1052: note = MISC_FEATURE - Exemplary SaCas9 polypeptide sequence
KRNYILGLDIGITSVGYGIIDYETRDVIDAGVRLFKEANVENNEGRRSKRGARRLKRRRRHRIQRVKKLLFDYNLLTDHSELSGINPYEARVKGLSQKLSEEEFSAALLHLAKRRGVHNVNEVEEDTGNELSTKEQISRNSKALEEKYVAELQLERLKKDGEVRGSINRFKTSDYVKEAKQLLKVQKAYHQLDQSFIDTYIDLLETRRTYYEGPGEGSPFGWKDIKEWYEMLMGHCTYFPEELRSVKYAYNADLYNALNDLNNLVITRDENEKLEYYEKFQIIENVFKQKKKPTLKQIAKEILVNEEDIKGYRVTSTGKPEFTNLKVYHDIKDITARKEIIENAELLDQIAKILTIYQSSEDIQEELTNLNSELTQEEIEQISNLKGYTGTHNLSLKAINLILDELWHTNDNQIAIFNRLKLVPKKVDLSQQKEIPTTLVDDFILSPVVKRSFIQSIKVINAIIKKYGLPNDIIIELAREKNSKDAQKMINEMQKRNRQTNERIEEIIRTTGKENAKYLIEKIKLHDMQEGKCLYSLEAIPLEDLLNNPFNYEVDHIIPRSVSFDNSFNNKVLVKQEENSKKGNRTPFQYLSSSDSKISYETFKKHILNLAKGKGRISKTKKEYLLEERDINRFSVQKDFINRNLVDTRYATRGLMNLLRSYFRVNNLDVKVKSINGGFTSFLRRKWKFKKERNKGYKHHAEDALIIANADFIFKEWKKLDKAKKVMENQMFEEKQAESMPEIETEQEYKEIFITPHQIKHIKDFKDYKYSHRVDKKPNRELINDTLYSTRKDDKGNTLIVNNLNGLYDKDNDKLKKLINKSPEKLLMYHHDPQTYQKLKLIMEQYGDEKNPLYKYYEETGNYLTKYSKKDNGPVIKKIKYYGNKLNAHLDITDDYPNSRNKVVKLSLKPYRFDVYLDNGVYKFVTVKNLDVIKKENYYEVNSKCYEEAKKLKKISNQAEFIASFYNNDLIKINGELYRVIGVNNDLLNRIEVNMIDITYREYLENMNDKRPPRIIKTIASKTQSIKKYSTDILGNLYEVKSKKHPQIIKKG

SEQ ID NO: 219 - protein, 1052 aa, Staphylococcus aureus
  REGION 1..1052: note = MISC_FEATURE - SaCas9n polypeptide sequence
KRNYILGLDIGITSVGYGIIDYETRDVIDAGVRLFKEANVENNEGRRSKRGARRLKRRRRHRIQRVKKLLFDYNLLTDHSELSGINPYEARVKGLSQKLSEEEFSAALLHLAKRRGVHNVNEVEEDTGNELSTKEQISRNSKALEEKYVAELQLERLKKDGEVRGSINRFKTSDYVKEAKQLLKVQKAYHQLDQSFIDTYIDLLETRRTYYEGPGEGSPFGWKDIKEWYEMLMGHCTYFPEELRSVKYAYNADLYNALNDLNNLVITRDENEKLEYYEKFQIIENVFKQKKKPTLKQIAKEILVNEEDIKGYRVTSTGKPEFTNLKVYHDIKDITARKEIIENAELLDQIAKILTIYQSSEDIQEELTNLNSELTQEEIEQISNLKGYTGTHNLSLKAINLILDELWHTNDNQIAIFNRLKLVPKKVDLSQQKEIPTTLVDDFILSPVVKRSFIQSIKVINAIIKKYGLPNDIIIELAREKNSKDAQKMINEMQKRNRQTNERIEEIIRTTGKENAKYLIEKIKLHDMQEGKCLYSLEAIPLEDLLNNPFNYEVDHIIPRSVSFDNSFNNKVLVKQEEASKKGNRTPFQYLSSSDSKISYETFKKHILNLAKGKGRISKTKKEYLLEERDINRFSVQKDFINRNLVDTRYATRGLMNLLRSYFRVNNLDVKVKSINGGFTSFLRRKWKFKKERNKGYKHHAEDALIIANADFIFKEWKKLDKAKKVMENQMFEEKQAESMPEIETEQEYKEIFITPHQIKHIKDFKDYKYSHRVDKKPNRELINDTLYSTRKDDKGNTLIVNNLNGLYDKDNDKLKKLINKSPEKLLMYHHDPQTYQKLKLIMEQYGDEKNPLYKYYEETGNYLTKYSKKDNGPVIKKIKYYGNKLNAHLDITDDYPNSRNKVVKLSLKPYRFDVYLDNGVYKFVTVKNLDVIKKENYYEVNSKCYEEAKKLKKISNQAEFIASFYNNDLIKINGELYRVIGVNNDLLNRIEVNMIDITYREYLENMNDKRPPRIIKTIASKTQSIKKYSTDILGNLYEVKSKKHPQIIKKG

SEQ ID NO: 220 - protein, 1052 aa, Staphylococcus aureus
  REGION 1..1052: note = MISC_FEATURE - SaKKH Cas9 polypeptide sequence
KRNYILGLDIGITSVGYGIIDYETRDVIDAGVRLFKEANVENNEGRRSKRGARRLKRRRRHRIQRVKKLLFDYNLLTDHSELSGINPYEARVKGLSQKLSEEEFSAALLHLAKRRGVHNVNEVEEDTGNELSTKEQISRNSKALEEKYVAELQLERLKKDGEVRGSINRFKTSDYVKEAKQLLKVQKAYHQLDQSFIDTYIDLLETRRTYYEGPGEGSPFGWKDIKEWYEMLMGHCTYFPEELRSVKYAYNADLYNALNDLNNLVITRDENEKLEYYEKFQIIENVFKQKKKPTLKQIAKEILVNEEDIKGYRVTSTGKPEFTNLKVYHDIKDITARKEIIENAELLDQIAKILTIYQSSEDIQEELTNLNSELTQEEIEQISNLKGYTGTHNLSLKAINLILDELWHTNDNQIAIFNRLKLVPKKVDLSQQKEIPTTLVDDFILSPVVKRSFIQSIKVINAIIKKYGLPNDIIIELAREKNSKDAQKMINEMQKRNRQTNERIEEIIRTTGKENAKYLIEKIKLHDMQEGKCLYSLEAIPLEDLLNNPFNYEVDHIIPRSVSFDNSFNNKVLVKQEEASKKGNRTPFQYLSSSDSKISYETFKKHILNLAKGKGRISKTKKEYLLEERDINRFSVQKDFINRNLVDTRYATRGLMNLLRSYFRVNNLDVKVKSINGGFTSFLRRKWKFKKERNKGYKHHAEDALIIANADFIFKEWKKLDKAKKVMENQMFEEKQAESMPEIETEQEYKEIFITPHQIKHIKDFKDYKYSHRVDKKPNRKLINDTLYSTRKDDKGNTLIVNNLNGLYDKDNDKLKKLINKSPEKLLMYHHDPQTYQKLKLIMEQYGDEKNPLYKYYEETGNYLTKYSKKDNGPVIKKIKYYGNKLNAHLDITDDYPNSRNKVVKLSLKPYRFDVYLDNGVYKFVTVKNLDVIKKENYYEVNSKCYEEAKKLKKISNQAEFIASFYKNDLIKINGELYRVIGVNNDLLNRIEVNMIDITYREYLENMNDKRPPHIIKTIASKTQSIKKYSTDILGNLYEVKSKKHPQIIKKG

SEQ ID NO: 221 - protein, 707 aa, synthetic construct
  REGION 1..707: note = Casphi-1 polypeptide sequence
MADTPTLFTQFLRHHLPGQRFRKDILKQAGRILANKGEDATIAFLRGKSEESPPDFQPPVKCPIIACSRPLTEWPIYQASVAIQGYVYGQSLAEFEASDPGCSKDGLLGWFDKTGVCTDYFSVQGLNLIFQNARKRYIGVQTKVTNRNEKRHKKLKRINAKRIAEGLPELTSDEPESALDETGHLIDPPGLNTNIYCYQQVSPKPLALSEVNQLPTAYAGYSTSGDDPIQPMVTKDRLSISKGQPGYIPEHQRALLSQKKHRRMRGYGLKARALLVIVRIQDDWAVIDLRSLLRNAYWRRIVQTKEPSTITKLLKLVTGDPVLDATRMVATFTYKPGIVQVRSAKCLKNKQGSKLFSERYLNETVSVTSIDLGSNNLVAVATYRLVNGNTPELLQRFTLPSHLVKDFERYKQAHDTLEDSIQKTAVASLPQGQQTEIRMWSMYGFREAQERVCQELGLADGSIPWNVMTATSTILTDLFLARGGDPKKCMFTSEPKKKKNSKQVLYKIRDRAWAKMYRTLLSKETREAWNKALWGLKRGSPDYARLSKRKEELARRCVNYTISTAEKRAQCGRTIVALEDLNIGFFHGRGKQEPGWVGLFTRKKENRWLMQALHKAFLELAHHRGYHVIEVNPAYTSQTCPVCRHCDPDNRDQHNREAFHCIGCGFRGNADLDVATHNIAMVAITGESLKRARGSVASKTPQPLAAE

SEQ ID NO: 222 - protein, 757 aa, synthetic construct
  REGION 1..757: note = Casphi-2 polypeptide sequence
MPKPAVESEFSKVLKKHFPGERFRSSYMKRGGKILAAQGEEAVVAYLQGKSEEEPPNFQPPAKCHVVTKSRDFAEWPIMKASEAIQRYIYALSTTERAACKPGKSSESHAAWFAATGVSNHGYSHVQGLNLIFDHTLGRYDGVLKKVQLRNEKARARLESINASRADEGLPEIKAEEEEVATNETGHLLQPPGINPSFYVYQTISPQAYRPRDEIVLPPEYAGYVRDPNAPIPLGVVRNRCDIQKGCPGYIPEWQREAGTAISPKTGKAVTVPGLSPKKNKRMRRYWRSEKEKAQDALLVTVRIGTDWVVIDVRGLLRNARWRTIAPKDISLNALLDLFTGDPVIDVRRNIVTFTYTLDACGTYARKWTLKGKQTKATLDKLTATQTVALVAIDLGQTNPISAGISRVTQENGALQCEPLDRFTLPDDLLKDISAYRIAWDRNEEELRARSVEALPEAQQAEVRALDGVSKETARTQLCADFGLDPKRLPWDKMSSNTTFISEALLSNSVSRDQVFFTPAPKKGAKKKAPVEVMRKDRTWARAYKPRLSVEAQKLKNEALWALKRTSPEYLKLSRRKEELCRRSINYVIEKTRRRTQCQIVIPVIEDLNVRFFHGSGKRLPGWDNFFTAKKENRWFIQGLHKAFSDLRTHRSFYVFEVRPERTSITCPKCGHCEVGNRDGEAFQCLSCGKTCNADLDVATHNLTQVALTGKTMPKREEPRDAQGTAPARKTKKASKSKAPPAEREDQTPAQEPSQTS

SEQ ID NO: 223 - protein, 766 aa, synthetic construct
  REGION 1..766: note = Casphi-3 polypeptide sequence
MEKEITELTKIRREFPNKKFSSTDMKKAGKLLKAEGPDAVRDFLNSCQEIIGDFKPPVKTNIVSISRPFEEWPVSMVGRAIQEYYFSLTKEELESVHPGTSSEDHKSFFNITGLSNYNYTSVQGLNLIFKNAKAIYDGTLVKANNKNKKLEKKFNEINHKRSLEGLPIITPDFEEPFDENGHLNNPPGINRNIYGYQGCAAKVFVPSKHKMVSLPKEYEGYNRDPNLSLAGFRNRLEIPEGEPGHVPWFQRMDIPEGQIGHVNKIQRFNFVHGKNSGKVKFSDKTGRVKRYHHSKYKDATKPYKFLEESKKVSALDSILAIITIGDDWVVFDIRGLYRNVFYRELAQKGLTAVQLLDLFTGDPVIDPKKGVVTFSYKEGVVPVFSQKIVPRFKSRDTLEKLTSQGPVALLSVDLGQNEPVAARVCSLKNINDKITLDNSCRISFLDDYKKQIKDYRDSLDELEIKIRLEAINSLETNQQVEIRDLDVFSADRAKANTVDMFDIDPNLISWDSMSDARVSTQISDLYLKNGGDESRVYFEINNKRIKRSDYNISQLVRPKLSDSTRKNLNDSIWKLKRTSEEYLKLSKRKLELSRAVVNYTIRQSKLLSGINDIVIILEDLDVKKKFNGRGIRDIGWDNFFSSRKENRWFIPAFHKAFSELSSNRGLCVIEVNPAWTSATCPDCGFCSKENRDGINFTCRKCGVSYHADIDVATLNIARVAVLGKPMSGPADRERLGDTKKPRVARSRKTMKRKDISNSTVEAMVTA

SEQ ID NO: 224 - protein, 765 aa, synthetic construct
  REGION 1..765: note = Casphi-4 polypeptide sequence
MYSLEMADLKSEPSLLAKLLRDRFPGKYWLPKYWKLAEKKRLTGGEEAACEYMADKQLDSPPPNFRPPARCVILAKSRPFEDWPVHRVASKAQSFVIGLSEQGFAALRAAPPSTADARRDWLRSHGASEDDLMALEAQLLETIMGNAISLHGGVLKKIDNANVKAAKRLSGRNEARLNKGLQELPPEQEGSAYGADGLLVNPPGLNLNIYCRKSCCPKPVKNTARFVGHYPGYLRDSDSILISGTMDRLTIIEGMPGHIPAWQREQGLVKPGGRRRRLSGSESNMRQKVDPSTGPRRSTRSGTVNRSNQRTGRNGDPLLVEIRMKEDWVLLDARGLLRNLRWRESKRGLSCDHEDLSLSGLLALFSGDPVIDPVRNEVVFLYGEGIIPVRSTKPVGTRQSKKLLERQASMGPLTLISCDLGQTNLIAGRASAISLTHGSLGVRSSVRIELDPEIIKSFERLRKDADRLETEILTAAKETLSDEQRGEVNSHEKDSPQTAKASLCRELGLHPPSLPWGQMGPSTTFIADMLISHGRDDDAFLSHGEFPTLEKRKKFDKRFCLESRPLLSSETRKALNESLWEVKRTSSEYARLSQRKKEMARRAVNFVVEISRRKTGLSNVIVNIEDLNVRIFHGGGKQAPGWDGFFRPKSENRWFIQAIHKAFSDLAAHHGIPVIESDPQRTSMTCPECGHCDSKNRNGVRFLCKGCGASMDADFDAACRNLERVALTGKPMPKPSTSCERLLSATTGKVCSDHSLSHDAIEKAS

SEQ ID NO: 225 - protein, 793 aa, synthetic construct
  REGION 1..793: note = Casphi-5 polypeptide sequence
MSSLPTPLELLKQKHADLFKGLQFSSKDNKMAGKVLKKDGEEAALAFLSERGVSRGELPNFRPPAKTLVVAQSRPFEEFPIYRVSEAIQLYVYSLSVKELETVPSGSSTKKEHQRFFQDSSVPDFGYTSVQGLNKIFGLARGIYLGVITRGENQLQKAKSKHEALNKKRRASGEAETEFDPTPYEYMTPERKLAKPPGVNHSIMCYVDISVDEFDFRNPDGIVLPSEYAGYCREINTAIEKGTVDRLGHLKGGPGYIPGHQRKESTTEGPKINFRKGRIRRSYTALYAKRDSRRVRQGKLALPSYRHHMMRLNSNAESAILAVIFFGKDWVVFDLRGLLRNVRWRNLFVDGSTPSTLLGMFGDPVIDPKRGVVAFCYKEQIVPVVSKSITKMVKAPELLNKLYLKSEDPLVLVAIDLGQTNPVGVGVYRVMNASLDYEVVTRFALESELLREIESYRQRTNAFEAQIRAETFDAMTSEEQEEITRVRAFSASKAKENVCHRFGMPVDAVDWATMGSNTIHIAKWVMRHGDPSLVEVLEYRKDNEIKLDKNGVPKKVKLTDKRIANLTSIRLRFSQETSKHYNDTMWELRRKHPVYQKLSKSKADFSRRVVNSIIRRVNHLVPRARIVFIIEDLKNLGKVFHGSGKRELGWDSYFEPKSENRWFIQVLHKAFSETGKHKGYYIIECWPNWTSCTCPKCSCCDSENRHGEVFRCLACGYTCNTDFGTAPDNLVKIATTGKGLPGPKKRCKGSSKGKNPKIARSSETGVSVTESGAPKVKKSSPTQTSQSSSQSAP

SEQ ID NO: 226 - protein, 441 aa, synthetic construct
  REGION 1..441: note = Casphi-6 polypeptide sequence
MNKIEKEKTPLAKLMNENFAGLRFPFAIIKQAGKKLLKEGELKTIEYMTGKGSIEPLPNFKPPVKCLIVAKRRDLKYFPICKASCEIQSYVYSLNYKDFMDYFSTPMTSQKQHEEFFKKSGLNIEYQNVAGLNLIFNNVKNTYNGVILKVKNRNEKLKKKAIKNNYEFEEIKTFNDDGCLINKPGINNVIYCFQSISPKILKNITHLPKEYNDYDCSVDRNIIQKYVSRLDIPESQPGHVPEWQRKLPEFNNTNNPRRRRKWYSNGRNISKGYSVDQVNQAKIEDSLLAQIKIGEDWIILDIRGLLRDLNRRELISYKNKLTIKDVLGFFSDYPIIDIKKNLVTFCYKEGVIQVVSQKSIGNKKSKQLLEKLIENKPIALVSIDLGQTNPVSVKISKLNKINNKISIESFTYRFLNEEILKEIEKYRKDYDKLELKLINEA

SEQ ID NO: 227 - protein, 772 aa, synthetic construct
  REGION 1..772: note = Casphi-7 polypeptide sequence
MSNTAVSTREHMSNKTTPPSPLSLLLRAHFPGLKFESQDYKIAGKKLRDGGPEAVISYLTGKGQAKLKDVKPPAKAFVIAQSRPFIEWDLVRVSRQIQEKIFGIPATKGRPKQDGLSETAFNEAVASLEVDGKSKLNEETRAAFYEVLGLDAPSLHAQAQNALIKSAISIREGVLKKVENRNEKNLSKTKRRKEAGEEATFVEEKAHDERGYLIHPPGVNQTIPGYQAVVIKSCPSDFIGLPSGCLAKESAEALTDYLPHDRMTIPKGQPGYVPEWQHPLLNRRKNRRRRDWYSASLNKPKATCSKRSGTPNRKNSRTDQIQSGRFKGAIPVLMRFQDEWVIIDIRGLLRNARYRKLLKEKSTIPDLLSLFTGDPSIDMRQGVCTFIYKAGQACSAKMVKTKNAPEILSELTKSGPVVLVSIDLGQTNPIAAKVSRVTQLSDGQLSHETLLRELLSNDSSDGKEIARYRVASDRLRDKLANLAVERLSPEHKSEILRAKNDTPALCKARVCAALGLNPEMIAWDKMTPYTEFLATAYLEKGGDRKVATLKPKNRPEMLRRDIKFKGTEGVRIEVSPEAAEAYREAQWDLQRTSPEYLRLSTWKQELTKRILNQLRHKAAKSSQCEVVVMAFEDLNIKMMHGNGKWADGGWDAFFIKKRENRWFMQAFHKSLTELGAHKGVPTIEVTPHRTSITCTKCGHCDKANRDGERFACQKCGFVAHADLEIATDNIERVALTGKPMPKPESERSGDAKKSVGARKAAFKPEEDAEAAE

SEQ ID NO: 228 - protein, 717 aa, synthetic construct
  REGION 1..717: note = Casphi-8 polypeptide sequence
MIKPTVSQFLTPGFKLIRNHSRTAGLKLKNEGEEACKKFVRENEIPKDECPNFQGGPAIANIIAKSREFTEWEIYQSSLAIQEVIFTLPKDKLPEPILKEEWRAQWLSEHGLDTVPYKEAAGLNLIIKNAVNTYKGVQVKVDNKNKNNLAKINRKNEIAKLNGEQEISFEEIKAFDDKGYLLQKPSPNKSIYCYQSVSPKPFITSKYHNVNLPEEYIGYYRKSNEPIVSPYQFDRLRIPIGEPGYVPKWQYTFLSKKENKRRKLSKRIKNVSPILGIICIKKDWCVFDMRGLLRTNHWKKYHKPTDSINDLFDYFTGDPVIDTKANVVRFRYKMENGIVNYKPVREKKGKELLENICDQNGSCKLATVDVGQNNPVAIGLFELKKVNGELTKTLISRHPTPIDFCNKITAYRERYDKLESSIKLDAIKQLTSEQKIEVDNYNNNFTPQNTKQIVCSKLNINPNDLPWDKMISGTHFISEKAQVSNKSEIYFTSTDKGKTKDVMKSDYKWFQDYKPKLSKEVRDALSDIEWRLRRESLEFNKLSKSREQDARQLANWISSMCDVIGIENLVKKNNFFGGSGKREPGWDNFYKPKKENRWWINAIHKALTELSQNKGKRVILLPAMRTSITCPKCKYCDSKNRNGEKFNCLKCGIELNADIDVATENLATVAITAQSMPKPTCERSGDAKKPVRARKAKAPEFHDKLAPSYTVVLREAV

SEQ ID NO: 229 - protein, 793 aa, synthetic construct
  REGION 1..793: note = Casphi-9 polypeptide sequence
MRSSREIGDKILMRQPAEKTAFQVFRQEVIGTQKLSGGDAKTAGRLYKQGKMEAAREWLLKGARDDVPPNFQPPAKCLVVAVSHPFEEWDISKTNHDVQAYIYAQPLQAEGHLNGLSEKWEDTSADQHKLWFEKTGVPDRGLPVQAINKIAKAAVNRAFGVVRKVENRNEKRRSRDNRIAEHNRENGLTEVVREAPEVATNADGFLLHPPGIDPSILSYASVSPVPYNSSKHSFVRLPEEYQAYNVEPDAPIPQFVVEDRFAIPPGQPGYVPEWQRLKCSTNKHRRMRQWSNQDYKPKAGRRAKPLEFQAHLTRERAKGALLVVMRIKEDWVVFDVRGLLRNVEWRKVLSEEAREKLTLKGLLDLFTGDPVIDTKRGIVTFLYKAEITKILSKRTVKTKNARDLLLRLTEPGEDGLRREVGLVAVDLGQTHPIAAAIYRIGRTSAGALESTVLHRQGLREDQKEKLKEYRKRHTALDSRLRKEAFETLSVEQQKEIVTVSGSGAQITKDKVCNYLGVDPSTLPWEKMGSYTHFISDDFLRRGGDPNIVHFDRQPKKGKVSKKSQRIKRSDSQWVGRMRPRLSQETAKARMEADWAAQNENEEYKRLARSKQELARWCVNTLLQNTRCITQCDEIVVVIEDLNVKSLHGKGAREPGWDNFFTPKTENRWFIQILHKTFSELPKHRGEHVIEGCPLRTSITCPACSYCDKNSRNGEKFVCVACGATFHADFEVATYNLVRLATTGMPMPKSLERQGGGEKAGGARKARKKAKQVEKIVVQANANVTMNGASLHSP

SEQ ID NO: 230 - protein, 812 aa, synthetic construct
  REGION 1..812: note = Casphi-10 polypeptide sequence
MDMLDTETNYATETPAQQQDYSPKPPKKAQRAPKGFSKKARPEKKPPKPITLFTQKHFSGVRFLKRVIRDASKILKLSESRTITFLEQAIERDGSAPPDVTPPVHNTIMAVTRPFEEWPEVILSKALQKHCYALTKKIKIKTWPKKGPGKKCLAAWSARTKIPLIPGQVQATNGLFDRIGSIYDGVEKKVTNRNANKKLEYDEAIKEGRNPAVPEYETAYNIDGTLINKPGYNPNLYITQSRTPRLITEADRPLVEKILWQMVEKKTQSRNQARRARLEKAAHLQGLPVPKFVPEKVDRSQKIEIRIIDPLDKIEPYMPQDRMAIKASQDGHVPYWQRPFLSKRRNRRVRAGWGKQVSSIQAWLTGALLVIVRLGNEAFLADIRGALRNAQWRKLLKPDATYQSLFNLFTGDPVVNTRTNHLTMAYREGVVNIVKSRSFKGRQTREHLLTLLGQGKTVAGVSFDLGQKHAAGLLAAHFGLGEDGNPVFTPIQACFLPQRYLDSLTNYRNRYDALTLDMRRQSLLALTPAQQQEFADAQRDPGGQAKRACCLKLNLNPDEIRWDLVSGISTMISDLYIERGGDPRDVHQQVETKPKGKRKSEIRILKIRDGKWAYDFRPKIADETRKAQREQLWKLQKASSEFERLSRYKINIARAIANWALQWGRELSGCDIVIPVLEDLNVGSKFFDGKGKWLLGWDNRFTPKKENRWFIKVLHKAVAELAPHRGVPVYEVMPHRTSMTCPACHYCHPTNREGDRFECQSCHVVKNTDRDVAPYNILRVAVEGKTLDRWQAEKKPQAEPDRPMILIDNQES

SEQ ID NO: 231 - protein, 84 aa, synthetic construct
  REGION 1..84: note = synthetic polypeptide sequence
MTNLSDIIEKETGKQLVIQESILMLPEEVEEVIGNKPESDILVHTAYDESTDENVMLLTSDAPEYKPWALVIQDSNGENKIKML

SEQ ID NO: 232 - protein, 1129 aa, Alicyclobacillus acidoterrestris
  REGION 1..1129: note = MISC_FEATURE - Cas12b/C2c1; sp|T0D7A2|C2C1_ALIAG CRISPR-associated endonuclease C2c1 OS = Alicyclobacillus acido-terrestris (strain ATCC 49025 /DSM 3922/ CIP 106132 / NCIMB 13137/GD3B) GN=c2c1 PE=1 SV=1; Cas12b/C2c1 polypeptide sequence
MAVKSIKVKLRLDDMPEIRAGLWKLHKEVNAGVRYYTEWLSLLRQENLYRRSPNGDGEQECDKTAEECKAELLERLRARQVENGHRGPAGSDDELLQLARQLYELLVPQAIGAKGDAQQIARKFLSPLADKDAVGGLGIAKAGNKPRWVRMREAGEPGWEEEKEKAETRKSADRTADVLRALADFGLKPLMRVYTDSEMSSVEWKPLRKGQAVRTWDRDMFQQAIERMMSWESWNQRVGQEYAKLVEQKNRFEQKNFVGQEHLVHLVNQLQQDMKEASPGLESKEQTAHYVTGRALRGSDKVFEKWGKLAPDAPFDLYDAEIKNVQRRNTRRFGSHDLFAKLAEPEYQALWREDASFLTRYAVYNSILRKLNHAKMFATFTLPDATAHPIWTRFDKLGGNLHQYTFLFNEFGERRHAIRFHKLLKVENGVAREVDDVTVPISMSEQLDNLLPRDPNEPIALYFRDYGAEQHFTGEFGGAKIQCRRDQLAHMHRRRGARDVYLNVSVRVQSQSEARGERRPPYAAVFRLVGDNHRAFVHFDKLSDYLAEHPDDGKLGSEGLLSGLRVMSVDLGLRTSASISVFRVARKDELKPNSKGRVPFFFPIKGNDNLVAVHERSQLLKLPGETESKDLRAIREERQRTLRQLRTQLAYLRLLVRCGSEDVGRRERSWAKLIEQPVDAANHMTPDWREAFENELQKLKSLHGICSDKEWMDAVYESVRRVWRHMGKQVRDWRKDVRSGERPKIRGYAKDVVGGNSIEQIEYLERQYKFLKSWSFFGKVSGQVIRAEKGSRFAITLREHIDHAKEDRLKKLADRIIMEALGYVYALDERGKGKWVAKYPPCQLILLEELSEYQFNNDRPPSENNQLMQWSHRGVFQELINQAQVHDLLVGTMYAAFSSRFDARTGAPGIRCRRVPARCTQEHNPEPFPWWLNKFVVEHTLDACPLRADDLIPTGEGEIFVSPFSAEEGDFHQIHADLNAAQNLQQRLWSDFDISQIRLRCDWGEVDGELVLIPRLTGKRTADSYSNKVFYTNTGVTYYERERGKKRRKVFAQEKLSEEEAELLVEADEAREKSVVLMRDPSGIINRGNWTRQKEFWSMVNQRIEGYLVKQIRSRVPLQDSACENTGDI

SEQ ID NO: 233 - protein, 1368 aa, Mus musculus
  REGION 1..1368: note = MISC_FEATURE - high fidelity Cas9 polypeptide sequence
MDKKYSIGLAIGTNSVGWAVITDEYKVPSKKFKVLGNTDRHSIKKNLIGALLFDSGETAEATRLKRTARRRYTRRKNRICYLQEIFSNEMAKVDDSFFHRLEESFLVEEDKKHERHPIFGNIVDEVAYHEKYPTIYHLRKKLVDSTDKADLRLIYLALAHMIKFRGHFLIEGDLNPDNSDVDKLFIQLVQTYNQLFEENPINASGVDAKAILSARLSKSRRLENLIAQLPGEKKNGLFGNLIALSLGLTPNFKSNFDLAEDAKLQLSKDTYDDDLDNLLAQIGDQYADLFLAAKNLSDAILLSDILRVNTEITKAPLSASMIKRYDEHHQDLTLLKALVRQQLPEKYKEIFFDQSKNGYAGYIDGGASQEEFYKFIKPILEKMDGTEELLVKLNREDLLRKQRTFDNGSIPHQIHLGELHAILRRQEDFYPFLKDNREKIEKILTFRIPYYVGPLARGNSRFAWMTRKSEETITPWNFEEVVDKGASAQSFIERMTAFDKNLPNEKVLPKHSLLYEYFTVYNELTKVKYVTEGMRKPAFLSGEQKKAIVDLLFKTNRKVTVKQLKEDYFKKIECFDSVEISGVEDRFNASLGTYHDLLKIIKDKDFLDNEENEDILEDIVLTLTLFEDREMIEERLKTYAHLFDDKVMKQLKRRRYTGWGALSRKLINGIRDKQSGKTILDFLKSDGFANRNFMALIHDDSLTFKEDIQKAQVSGQGDSLHEHIANLAGSPAIKKGILQTVKVVDELVKVMGRHKPENIVIEMARENQTTQKGQKNSRERMKRIEEGIKELGSQILKEHPVENTQLQNEKLYLYYLQNGRDMYVDQELDINRLSDYDVDHIVPQSFLKDDSIDNKVLTRSDKNRGKSDNVPSEEVVKKMKNYWRQLLNAKLITQRKFDNLTKAERGGLSELDKAGFIKRQLVETRAITKHVAQILDSRMNTKYDENDKLIREVKVITLKSKLVSDFRKDFQFYKVREINNYHHAHDAYLNAVVGTALIKKYPKLESEFVYGDYKVYDVRKMIAKSEQEIGKATAKYFFYSNIMNFFKTEITLANGEIRKRPLIETNGETGEIVWDKGRDFATVRKVLSMPQVNIVKKTEVQTGGFSKESILPKRNSDKLIARKKDWDPKKYGGFDSPTVAYSVLVVAKVEKGKSKKLKSVKELLGITIMERSSFEKNPIDFLEAKGYKEVKKDLIIKLPKYSLFELENGRKRMLASAGELQKGNELALPSKYVNFLYLASHYEKLKGSPEDNEQKQLFVEQHKHYLDEIIEQISEFSKRVILADANLDKVLSAYNKHRDKPIREQAENIIHLFTLTNLGAPAAFKYFDTTIDRKRYTSTKEVLDATLIHQSITGLYETRIDLSQLGGD

SEQ ID NO: 234 - protein, 1368 aa, Streptococcus pyogenes
  REGION 1..1368: note = MISC_FEATURE - PAM-binding SpEQR Cas9 polypeptide sequence
MDKKYSIGLAIGTNSVGWAVITDEYKVPSKKFKVLGNTDRHSIKKNLIGALLFDSGETAEATRLKRTARRRYTRRKNRICYLQEIFSNEMAKVDDSFFHRLEESVLVEEDKKHERHPIFGNIVDEVAYHEKYPTIYHLRKKLVDSTDKADLRLIYLALAHMIKFRGHFLIEGDLNPDNSDVDKLFIQLVQTYNQLFEENPINASGVDAKAILSARLSKSRRLENLIAQLPGEKKNGLFGNLIALSLGLTPNFKSNFDLAEDAKLQLSKDTYDDDLDNLLAQIGDQYADLFLAAKNLSDAILLSDILRVNTEITKAPLSASMIKRYDEHHQDLTLLKALVRQQLPEKYKEIFFDQSKNGYAGYIDGGASQEEFYKFIKPILEKMDGTEELLVKLNREDLLRKQRTFDNGSIPHQIHLGELHAILRRQEDFYPFLKDNREKIEKILTFRIPYYVGPLARGNSRFAWMTRKSEETITPWNFEEVVDKGASAQSFIERMTNFDKNLPNEKVLPKHSLLYEYFTVYNELTKVKYVTEGMRKPAFLSGEQKKAIVDLLFKTNRKVTVKQLKEDYFKKIECFDSVEISGVEDRFNASLGTYHDLLKIIKDKDFLDNEENEDILEDIVLTLTLFEDREMIEERLKTYAHLFDDKVMKQLKRRRYTGWGRLSRKLINGIRDKQSGKTILDFLKSDGFANRNFMQLIHDDSLTFKEDIQKAQVSGQGDSLHEHIANLAGSPAIKKGILQTVKVVDELVKVMGRHKPENIVIEMARENQTTQKGQKNSRERMKRIEEGIKELGSQILKEHPVENTQLQNEKLYLYYLQNGRDMYVDQELDINRLSDYDVDHIVPQSFLKDDSIDNKVLTRSDKNRGKSDNVPSEEVVKKMKNYWRQLLNAKLITQRKFDNLTKAERGGLSELDKAGFIKRQLVETRQITKHVAQILDSRMNTKYDENDKLIREVKVITLKSKLVSDFRKDFQFYKVREINNYHHAHDAYLNAVVGTALIKKYPKLESEFVYGDYKVYDVRKMIAKSEQEIGKATAKYFFYSNIMNFFKTEITLANGEIRKRPLIETNGETGEIVWDKGRDFATVRKVLSMPQVNIVKKTEVQTGGFSKESILPKRNSDKLIARKKDWDPKKYGGFESPTVAYSVLVVAKVEKGKSKKLKSVKELLGITIMERSSFEKNPIDFLEAKGYKEVKKDLIIKLPKYSLFELENGRKRMLASAGELQKGNELALPSKYVNFLYLASHYEKLKGSPEDNEQKQLFVEQHKHYLDEIIEQISEFSKRVILADANLDKVLSAYNKHRDKPIREQAENIIHLFTLTNLGAPAAFKYFDTTIDRKQYRSTKEVLDATLIHQSITGLYETRIDLSQLGGD

SEQ ID NO: 235 - protein, 1368 aa, Streptococcus pyogenes
  REGION 1..1368: note = MISC_FEATURE - PAM-binding SpVQR Cas9 polypeptide sequence
MDKKYSIGLAIGTNSVGWAVITDEYKVPSKKFKVLGNTDRHSIKKNLIGALLFDSGETAEATRLKRTARRRYTRRKNRICYLQEIFSNEMAKVDDSFFHRLEESFLVEEDKKHERHPIFGNIVDEVAYHEKYPTIYHLRKKLVDSTDKADLRLIYLALAHMIKFRGHFLIEGDLNPDNSDVDKLFIQLVQTYNQLFEENPINASGVDAKAILSARLSKSRRLENLIAQLPGEKKNGLFGNLIALSLGLTPNFKSNFDLAEDAKLQLSKDTYDDDLDNLLAQIGDQYADLFLAAKNLSDAILLSDILRVNTEITKAPLSASMIKRYDEHHQDLTLLKALVRQQLPEKYKEIFFDQSKNGYAGYIDGGASQEEFYKFIKPILEKMDGTEELLVKLNREDLLRKQRTFDNGSIPHQIHLGELHAILRRQEDFYPFLKDNREKIEKILTFRIPYYVGPLARGNSRFAWMTRKSEETITPWNFEEVVDKGASAQSFIERMTNFDKNLPNEKVLPKHSLLYEYFTVYNELTKVKYVTEGMRKPAFLSGEQKKAIVDLLFKTNRKVTVKQLKEDYFKKIECFDSVEISGVEDRFNASLGTYHDLLKIIKDKDFLDNEENEDILEDIVLTLTLFEDREMIEERLKTYAHLFDDKVMKQLKRRRYTGWGRLSRKLINGIRDKQSGKTILDFLKSDGFANRNFMQLIHDDSLTFKEDIQKAQVSGQGDSLHEHIANLAGSPAIKKGILQTVKVVDELVKVMGRHKPENIVIEMARENQTTQKGQKNSRERMKRIEEGIKELGSQILKEHPVENTQLQNEKLYLYYLQNGRDMYVDQELDINRLSDYDVDHIVPQSFLKDDSIDNKVLTRSDKNRGKSDNVPSEEVVKKMKNYWRQLLNAKLITQRKFDNLTKAERGGLSELDKAGFIKRQLVETRQITKHVAQILDSRMNTKYDENDKLIREVKVITLKSKLVSDFRKDFQFYKVREINNYHHAHDAYLNAVVGTALIKKYPKLESEFVYGDYKVYDVRKMIAKSEQEIGKATAKYFFYSNIMNFFKTEITLANGEIRKRPLIETNGETGEIVWDKGRDFATVRKVLSMPQVNIVKKTEVQTGGFSKESILPKRNSDKLIARKKDWDPKKYGGFVSPTVAYSVLVVAKVEKGKSKKLKSVKELLGITIMERSSFEKNPIDFLEAKGYKEVKKDLIIKLPKYSLFELENGRKRMLASAGELQKGNELALPSKYVNFLYLASHYEKLKGSPEDNEQKQLFVEQHKHYLDEIIEQISEFSKRVILADANLDKVLSAYNKHRDKPIREQAENIIHLFTLTNLGAPAAFKYFDTTIDRKQYRSTKEVLDATLIHQSITGLYETRIDLSQLGGD

SEQ ID NO: 236 - protein, 1368 aa, Streptococcus pyogenes
  REGION 1..1368: note = MISC_FEATURE - SpVQR Cas9 polypeptide sequence
MDKKYSIGLAIGTNSVGWAVITDEYKVPSKKFKVLGNTDRHSIKKNLIGALLFDSGETAEATRLKRTARRRYTRRKNRICYLQEIFSNEMAKVDDSFFHRLEESFLVEEDKKHERHPIFGNIVDEVAYHEKYPTIYHLRKKLVDSTDKADLRLIYLALAHMIKFRGHFLIEGDLNPDNSDVDKLFIQLVQTYNQLFEENPINASGVDAKAILSARLSKSRRLENLIAQLPGEKKNGLFGNLIALSLGLTPNFKSNFDLAEDAKLQLSKDTYDDDLDNLLAQIGDQYADLFLAAKNLSDAILLSDILRVNTEITKAPLSASMIKRYDEHHQDLTLLKALVRQQLPEKYKEIFFDQSKNGYAGYIDGGASQEEFYKFIKPILEKMDGTEELLVKLNREDLLRKQRTFDNGSIPHQIHLGELHAILRRQEDFYPFLKDNREKIEKILTFRIPYYVGPLARGNSRFAWMTRKSEETITPWNFEEVVDKGASAQSFIERMTNFDKNLPNEKVLPKHSLLYEYFTVYNELTKVKYVTEGMRKPAFLSGEQKKAIVDLLFKTNRKVTVKQLKEDYFKKIECFDSVEISGVEDRFNASLGTYHDLLKIIKDKDFLDNEENEDILEDIVLTLTLFEDREMIEERLKTYAHLFDDKVMKQLKRRRYTGWGRLSRKLINGIRDKQSGKTILDFLKSDGFANRNFMQLIHDDSLTFKEDIQKAQVSGQGDSLHEHIANLAGSPAIKKGILQTVKVVDELVKVMGRHKPENIVIEMARENQTTQKGQKNSRERMKRIEEGIKELGSQILKEHPVENTQLQNEKLYLYYLQNGRDMYVDQELDINRLSDYDVDHIVPQSFLKDDSIDNKVLTRSDKNRGKSDNVPSEEVVKKMKNYWRQLLNAKLITQRKFDNLTKAERGGLSELDKAGFIKRQLVETRQITKHVAQILDSRMNTKYDENDKLIREVKVITLKSKLVSDFRKDFQFYKVREINNYHHAHDAYLNAVVGTALIKKYPKLESEFVYGDYKVYDVRKMIAKSEQEIGKATAKYFFYSNIMNFFKTEITLANGEIRKRPLIETNGETGEIVWDKGRDFATVRKVLSMPQVNIVKKTEVQTGGFSKESILPKRNSDKLIARKKDWDPKKYGGFVSPTVAYSVLVVAKVEKGKSKKLKSVKELLGITIMERSSFEKNPIDFLEAKGYKEVKKDLIIKLPKYSLFELENGRKRMLASARELQKGNELALPSKYVNFLYLASHYEKLKGSPEDNEQKQLFVEQHKHYLDEIIEQISEFSKRVILADANLDKVLSAYNKHRDKPIREQAENIIHLFTLTNLGAPAAFKYFDTTIDRKEYRSTKEVLDATLIHQSITGLYETRIDLSQLGGD

SEQ ID NO: 237 - protein, 1359 aa, Streptococcus macacae
  REGION 1..1359: note = MISC_FEATURE - SpyMacCas9 polypeptide sequence
MDKKYSIGLDIGTNSVGWAVITDDYKVPSKKFKVLGNTDRHSIKKNLIGALLFGSGETAEATRLKRTARRRYTRRKNRICYLQEIFSNEMAKVDDSFFHRLEESFLVEEDKKHERHPIFGNIVDEVAYHEKYPTIYHLRKKLADSTDKADLRLIYLALAHMIKFRGHFLIEGDLNPDNSDVDKLFIQLVQIYNQLFEENPINASRVDAKAILSARLSKSRRLENLIAQLPGEKRNGLFGNLIALSLGLTPNFKSNFDLAEDAKLQLSKDTYDDDLDNLLAQIGDQYADLFLAAKNLSDAILLSDILRVNSEITKAPLSASMIKRYDEHHQDLTLLKALVRQQLPEKYKEIFFDQSKNGYAGYIDGGASQEEFYKFIKPILEKMDGTEELLVKLNREDLLRKQRTFDNGSIPHQIHLGELHAILRRQEDFYPFLKDNREKIEKILTFRIPYYVGPLARGNSRFAWMTRKSEETITPWNFEEVVDKGASAQSFIERMTNFDKNLPNEKVLPKHSLLYEYFTVYNELTKVKYVTEGMRKPAFLSGEQKKAIVDLLFKTNRKVTVKQLKEDYFKKIECFDSVEISGVEDRFNASLGAYHDLLKIIKDKDFLDNEENEDILEDIVLTLTLFEDRGMIEERLKTYAHLFDDKVMKQLKRRRYTGWGRLSRKLINGIRDKQSGKTILDFLKSDGFANRNFMQLIHDDSLTFKEDIQKAQVSGQGHSLHEQIANLAGSPAIKKGILQTVKIVDELVKVMGHKPENIVIEMARENQTTQKGQKNSRERMKRIEEGIKELGSQILKEHPVENTQLQNEKLYLYYLQNGRDMYVDQELDINRLSDYDVDHIVPQSFIKDDSIDNKVLTRSDKNRGKSDNVPSEEVVKKMKNYWRQLLNAKLITQRKFDNLTKAERGGLSELDKAGFIKRQLVETRQITKHVAQILDSRMNTKYDENDKLIREVKVITLKSKLVSDFRKDFQFYKVREINNYHHAHDAYLNAVVGTALIKKYPKLESEFVYGDYKVYDVRKMIAKSEQEIGKATAKYFFYSNIMNFFKTEITLANGEIRKRPLIETNGETGEIVWDKGRDFATVRKVLSMPQVNIVKKTEIQTVGQNGGLFDDNPKSPLEVTPSKLVPLKKELNPKKYGGYQKPTTAYPVLLITDTKQLIPISVMNKKQFEQNPVKFLRDRGYQQVGKNDFIKLPKYTLVDIGDGIKRLWASSKEIHKGNQLVVSKKSQILLYHAHHLDSDLSNDYLQNHNQQFDVLFNEIISFSKKCKLGKEHIQKIENVYSNKKNSASIEELAESFIKLLGFTQLGATSPFNFLGVKLNQKQYKGKKDYILPCTEGTLIRQSITGLYETRVDLSKIGED

SEQ ID NO: 238 - protein, 1410 aa, synthetic construct
  REGION 1..1410: note = CP5 polypeptide sequence
  REGION 1..341: note = MISC_FEATURE - Sequence derived from Cas9
  REGION 342..362: note = MISC_FEATURE - Linker sequence
  REGION 363..1388: note = MISC_FEATURE - Sequence derived from Cas9
  REGION 1389..1410: note = MISC_FEATURE - Bipartite nuclear localization sequence
EIGKATAKYFFYSNIMNFFKTEITLANGEIRKRPLIETNGETGEIVWDKGRDFATVRKVLSMPQVNIVKKTEVQTGGFSKESILPKRNSDKLIARKKDWDPKKYGGFMQPTVAYSVLVVAKVEKGKSKKLKSVKELLGITIMERSSFEKNPIDFLEAKGYKEVKKDLIIKLPKYSLFELENGRKRMLASAKFLQKGNELALPSKYVNFLYLASHYEKLKGSPEDNEQKQLFVEQHKHYLDEIIEQISEFSKRVILADANLDKVLSAYNKHRDKPIREQAENIIHLFTLTNLGAPRAFKYFDTTIARKEYRSTKEVLDATLIHQSITGLYETRIDLSQLGGDGGSGGSGGSGGSGGSGGSGGMDKKYSIGLAIGTNSVGWAVITDEYKVPSKKFKVLGNTDRHSIKKNLIGALLFDSGETAEATRLKRTARRRYTRRKNRICYLQEIFSNEMAKVDDSFFHRLEESFLVEEDKKHERHPIFGNIVDEVAYHEKYPTIYHLRKKLVDSTDKADLRLIYLALAHMIKFRGHFLIEGDLNPDNSDVDKLFIQLVQTYNQLFEENPINASGVDAKAILSARLSKSRRLENLIAQLPGEKKNGLFGNLIALSLGLTPNFKSNFDLAEDAKLQLSKDTYDDDLDNLLAQIGDQYADLFLAAKNLSDAILLSDILRVNTEITKAPLSASMIKRYDEHHQDLTLLKALVRQQLPEKYKEIFFDQSKNGYAGYIDGGASQEEFYKFIKPILEKMDGTEELLVKLNREDLLRKQRTFDNGSIPHQIHLGELHAILRRQEDFYPFLKDNREKIEKILTFRIPYYVGPLARGNSRFAWMTRKSEETITPWNFEEVVDKGASAQSFIERMTNFDKNLPNEKVLPKHSLLYEYFTVYNELTKVKYVTEGMRKPAFLSGEQKKAIVDLLFKTNRKVTVKQLKEDYFKKIECFDSVEISGVEDRFNASLGTYHDLLKIIKDKDFLDNEENEDILEDIVLTLTLFEDREMIEERLKTYAHLFDDKVMKQLKRRRYTGWGRLSRKLINGIRDKQSGKTILDFLKSDGFANRNFMQLIHDDSLTFKEDIQKAQVSGQGDSLHEHIANLAGSPAIKKGILQTVKVVDELVKVMGRHKPENIVIEMARENQTTQKGQKNSRERMKRIEEGIKELGSQILKEHPVENTQLQNEKLYLYYLQNGRDMYVDQELDINRLSDYDVDHIVPQSFLKDDSIDNKVLTRSDKNRGKSDNVPSEEVVKKMKNYWRQLLNAKLITQRKFDNLTKAERGGLSELDKAGFIKRQLVETRQITKHVAQILDSRMNTKYDENDKLIREVKVITLKSKLVSDFRKDFQFYKVREINNYHHAHDAYLNAVVGTALIKKYPKLESEFVYGDYKVYDVRKMIAKSEQEGADKRTADGSEFESPKKKRKV

SEQ ID NO: 239 - protein, 1302 aa, synthetic construct
  REGION 1..1302: note = Cas12c1 polypeptide sequence
MQTKKTHLHLISAKASRKYRRTIACLSDTAKKDLERRKQSGAADPAQELSCLKTIKFKLEVPEGSKLPSFDRISQIYNALETIEKGSLSYLLFALILSGFRIFPNSSAAKTFASSSCYKNDQFASQIKEIFGEMVKNFIPSELESILKKGRRKNNKDWTEENIKRVLNSEFGRKNSEGSSALFDSFLSKFSQELFRKFDSWNEVNKKYLEAAELLDSMLASYGPFDSVCKMIGDSDSRNSLPDKSTIAFTNNAEITVDIESSVMPYMAIAALLREYRQSKSKAAPVAYVQSHLTTTNGNGLSWFFKFGLDLIRKAPVSSKQSTSDGSKSLQELFSVPDDKLDGLKFIKEACEALPEASLLCGEKGELLGYQDFRTSFAGHIDSWVANYVNRLFELIELVNQLPESIKLPSILTQKNHNLVASLGLQEAEVSHSLELFEGLVKNVRQTLKKLAGIDISSSPNEQDIKEFYAFSDVLNRLGSIRNQIENAVQTAKKDKIDLESAIEWKEWKKLKKLPKLNGLGGGVPKQQELLDKALESVKQIRHYQRIDFERVIQWAVNEHCLETVPKFLVDAEKKKINKESSTDFAAKENAVRFLLEGIGAAARGKTDSVSKAAYNWFVVNNFLAKKDLNRYFINCQGCIYKPPYSKRRSLAFALRSDNKDTIEVVWEKFETFYKEISKEIEKFNIFSQEFQTFLHLENLRMKLLLRRIQKPIPAEIAFFSLPQEYYDSLPPNVAFLALNQEITPSEYITQFNLYSSFLNGNLILLRRSRSYLRAKFSWVGNSKLIYAAKEARLWKIPNAYWKSDEWKMILDSNVLVFDKAGNVLPAPTLKKVCEREGDLRLFYPLLRQLPHDWCYRNPFVKSVGREKNVIEVNKEGEPKVASALPGSLFRLIGPAPFKSLLDDCFFNPLDKDLRECMLIVDQEISQKVEAQKVEASLESCTYSIAVPIRYHLEEPKVSNQFENVLAIDQGEAGLAYAVFSLKSIGEAETKPIAVGTIRIPSIRRLIHSVSTYRKKKQRLQNFKQNYDSTAFIMRENVTGDVCAKIVGLMKEFNAFPVLEYDVKNLESGSRQLSAVYKAVNSHFLYFKEPGRDALRKQLWYGGDSWTIDGIEIVTRERKEDGKEGVEKIVPLKVFPGRSVSARFTSKTCSCCGRNVFDWLFTEKKAKTNKKFNVNSKGELTTADGVIQLFEADRSKGPKFYARRKERTPLTKPIAKGSYSLEEIERRVRTNLRRAPKSKQSRDTSQSQYFCVYKDCALHFSGMQADENAAINIGRRFLTALRKNRRSDFPSNVKISDRLLDN

SEQ ID NO: 240 - protein, 1218 aa, synthetic construct
  REGION 1..1218: note = Cas12c2 polypeptide sequence
MTKHSIPLHAFRNSGADARKWKGRIALLAKRGKETMRTLQFPLEMSEPEAAAINTTPFAVAYNAIEGTGKGTLFDYWAKLHLAGFRFFPSGGAATIFRQQAVFEDASWNAAFCQQSGKDWPWLVPSKLYERFTKAPREVAKKDGSKKSIEFTQENVANESHVSLVGASITDKTPEDQKEFFLKMAGALAEKFDSWKSANEDRIVAMKVIDEFLKSEGLHLPSLENIAVKCSVETKPDNATVAWHDAPMSGVQNLAIGVFATCASRIDNIYDLNGGKLSKLIQESATTPNVTALSWLFGKGLEYFRTTDIDTIMQDFNIPASAKESIKPLVESAQAIPTMTVLGKKNYAPFRPNFGGKIDSWIANYASRLMLLNDILEQIEPGFELPQALLDNETLMSGIDMTGDELKELIEAVYAWVDAAKQGLATLLGRGGNVDDAVQTFEQFSAMMDTLNGTLNTISARYVRAVEMAGKDEARLEKLIECKFDIPKWCKSVPKLVGISGGLPKVEEEIKVMNAAFKDVRARMFVRFEEIAAYVASKGAGMDVYDALEKRELEQIKKLKSAVPERAHIQAYRAVLHRIGRAVQNCSEKTKQLFSSKVIEMGVFKNPSHLNNFIFNQKGAIYRSPFDRSRHAPYQLHADKLLKNDWLELLAEISATLMASESTEQMEDALRLERTRLQLQLSGLPDWEYPASLAKPDIEVEIQTALKMQLAKDTVTSDVLQRAFNLYSSVLSGLTFKLLRRSFSLKMRFSVADTTQLIYVPKVCDWAIPKQYLQAEGEIGIAARVVTESSPAKMVTEVEMKEPKALGHFMQQAPHDWYFDASLGGTQVAGRIVEKGKEVGKERKLVGYRMRGNSAYKTVLDKSLVGNTELSQCSMIIEIPYTQTVDADFRAQVQAGLPKVSINLPVKETITASNKDEQMLFDRFVAIDLGERGLGYAVFDAKTLELQESGHRPIKAITNLLNRTHHYEQRPNQRQKFQAKFNVNLSELRENTVGDVCHQINRICAYYNAFPVLEYMVPDRLDKQLKSVYESVTNRYIWSSTDAHKSARVQFWLGGETWEHPYLKSAKDKKPLVLSPGRGASGKGTSQTCSCCGRNPFDLIKDMKPRAKIAVVDGKAKLENSELKLFERNLESKDDMLARRHRNERAGMEQPLTPGNYTVDEIKALLRANLRRAPKNRRTKDTTVSEYHCVFSDCGKTMHADENAAVNIGGKFIADIEK

SEQ ID NO: 241 - protein, 1252 aa, Oleiphilus sp.
  REGION 1..1252: note = MISC_FEATURE - OspCas12c polypeptide sequence
MTKLRHRQKKLTHDWAGSKKREVLGSNGKLQNPLLMPVKKGQVTEFRKAFSAYARATKGEMTDGRKNMFTHSFEPFKTKPSLHQCELADKAYQSLHSYLPGSLAHFLLSAHALGFRIFSKSGEATAFQASSKIEAYESKLASELACVDLSIQNLTISTLFNALTTSVRGKGEETSADPLIARFYTLLTGKPLSRDTQGPERDLAEVISRKIASSFGTWKEMTANPLQSLQFFEEELHALDANVSLSPAFDVLIKMNDLQGDLKNRTIVFDPDAPVFEYNAEDPADIIIKLTARYAKEAVIKNQNVGNYVKNAITTTNANGLGWLLNKGLSLLPVSTDDELLEFIGVERSHPSCHALIELIAQLEAPELFEKNVFSDTRSEVQGMIDSAVSNHIARLSSSRNSLSMDSEELERLIKSFQIHTPHCSLFIGAQSLSQQLESLPEALQSGVNSADILLGSTQYMLTNSLVEESIATYQRTLNRINYLSGVAGQINGAIKRKAIDGEKIHLPAAWSELISLPFIGQPVIDVESDLAHLKNQYQTLSNEFDTLISALQKNFDLNFNKALLNRTQHFEAMCRSTKKNALSKPEIVSYRDLLARLTSCLYRGSLVLRRAGIEVLKKHKIFESNSELREHVHERKHFVFVSPLDRKAKKLLRLTDSRPDLLHVIDEILQHDNLENKDRESLWLVRSGYLLAGLPDQLSSSFINLPIITQKGDRRLIDLIQYDQINRDAFVMLVTSAFKSNLSGLQYRANKQSFVVTRTLSPYLGSKLVYVPKDKDWLVPSQMFEGRFADILQSDYMVWKDAGRLCVIDTAKHLSNIKKSVFSSEEVLAFLRELPHRTFIQTEVRGLGVNVDGIAFNNGDIPSLKTFSNCVQVKVSRTNTSLVQTLNRWFEGGKVSPPSIQFERAYYKKDDQIHEDAAKRKIRFQMPATELVHASDDAGWTPSYLLGIDPGEYGMGLSLVSINNGEVLDSGFIHINSLINFASKKSNHQTKVVPRQQYKSPYANYLEQSKDSAAGDIAHILDRLIYKLNALPVFEALSGNSQSAADQVWTKVLSFYTWGDNDAQNSIRKQHWFGASHWDIKGMLRQPPTEKKPKPYIAFPGSQVSSYGNSQRCSCCGRNPIEQLREMAKDTSIKELKIRNSEIQLFDGTIKLFNPDPSTVIERRRHNLGPSRIPVADRTFKNISPSSLEFKELITIVSRSIRHSPEFIAKKRGIGSEYFCAYSDCNSSLNSEANAAANVAQKFQKQLFFEL

SEQ ID NO: 242 - protein, 767 aa, synthetic construct
  REGION 1..767: note = Cas12g1 polypeptide sequence
MAQASSTPAVSPRPRPRYREERTLVRKLLPRPGQSKQEFRENVKKLRKAFLQFNADVSGVCQWAIQFRPRYGKPAEPTETFWKFFLEPETSLPPNDSRSPEFRRLQAFEAAAGINGAAALDDPAFTNELRDSILAVASRPKTKEAQRLFSRLKDYQPAHRMILAKVAAEWIESRYRRAHQNWERNYEEWKKEKQEWEQNHPELTPEIREAFNQIFQQLEVKEKRVRICPAARLLQNKDNCQYAGKNKHSVLCNQFNEFKKNHLQGKAIKFFYKDAEKYLRCGLQSLKPNVQGPFREDWNKYLRYMNLKEETLRGKNGGRLPHCKNLGQECEFNPHTALCKQYQQQLSSRPDLVQHDELYRKWRREYWREPRKPVFRYPSVKRHSIAKIFGENYFQADFKNSVVGLRLDSMPAGQYLEFAFAPWPRNYRPQPGETEISSVHLHFVGTRPRIGFRFRVPHKRSRFDCTQEELDELRSRTFPRKAQDQKFLEAARKRLLETFPGNAEQELRLLAVDLGTDSARAAFFIGKTFQQAFPLKIVKIEKLYEQWPNQKQAGDRRDASSKQPRPGLSRDHVGRHLQKMRAQASEIAQKRQELTGTPAPETTTDQAAKKATLQPFDLRGLTVHTARMIRDWARLNARQIIQLAEENQVDLIVLESLRGFRPPGYENLDQEKKRRVAFFAHGRIRRKVTEKAVERGMRVVTVPYLASSKVCAECRKKQKDNKQWEKNKKRGLFKCEGCGSQAQVDENAARVLGRVFWGEIELPTAIP

SEQ ID NO: 243 - protein, 870 aa, synthetic construct
  REGION 1..870: note = Cas12h1 polypeptide sequence
MKVHEIPRSQLLKIKQYEGSFVEWYRDLQEDRKKFASLLFRWAAFGYAAREDDGATYISPSQALLERRLLLGDAEDVAIKFLDVLFKGGAPSSSCYSLFYEDFALRDKAKYSGAKREFIEGLATMPLDKIIERIRQDEQLSKIPAEEWLILGAEYSPEEIWEQVAPRIVNVDRSLGKQLRERLGIKCRRPHDAGYCKILMEVVARQLRSHNETYHEYLNQTHEMKTKVANNLTNEFDLVCEFAEVLEEKNYGLGWYVLWQGVKQALKEQKKPTKIQIAVDQLRQPKFAGLLTAKWRALKGAYDTWKLKKRLEKRKAFPYMPNWDNDYQIPVGLTGLGVFTLEVKRTEVVVDLKEHGKLFCSHSHYFGDLTAEKHPSRYHLKFRHKLKLRKRDSRVEPTIGPWIEAALREITIQKKPNGVFYLGLPYALSHGIDNFQIAKRFFSAAKPDKEVINGLPSEMVVGAADLNLSNIVAPVKARIGKGLEGPLHALDYGYGELIDGPKILTPDGPRCGELISLKRDIVEIKSAIKEFKACQREGLTMSEETTTWLSEVESPSDSPRCMIQSRIADTSRRLNSFKYQMNKEGYQDLAEALRLLDAMDSYNSLLESYQRMHLSPGEQSPKEAKFDTKRASFRDLLRRRVAHTIVEYFDDCDIVFFEDLDGPSDSDSRNNALVKLLSPRTLLLYIRQALEKRGIGMVEVAKDGTSQNNPISGHVGWRNKQNKSEIYFYEDKELLVMDADEVGAMNILCRGLNHSVCPYSFVTKAPEKKNDEKKEGDYGKRVKRFLKDRYGSSNVRFLVASMGFVTVTTKRPKDALVGKRLYYHGGELVTHDLHNRMKDEIKYLVEKEVLARRVSLSDSTIKSYKSFAHV

SEQ ID NO: 244 - protein, 1093 aa, synthetic construct
  REGION 1..1093: note = Cas12i1 polypeptide sequence
MSNKEKNASETRKAYTTKMIPRSHDRMKLLGNFMDYLMDGTPIFFELWNQFGGGIDRDIISGTANKDKISDDLLLAVNWFKVMPINSKPQGVSPSNLANLFQQYSGSEPDIQAQEYFASNFDTEKHQWKDMRVEYERLLAELQLSRSDMHHDLKLMYKEKCIGLSLSTAHYITSVMFGTGAKNNRQTKHQFYSKVIQLLEESTQINSVEQLASIILKAGDCDSYRKLRIRCSRKGATPSILKIVQDYELGTNHDDEVNVPSLIANLKEKLGRFEYECEWKCMEKIKAFLASKVGPYYLGSYSAMLENALSPIKGMTTKNCKFVLKQIDAKNDIKYENEPFGKIVEGFFDSPYFESDTNVKWVLHPHHIGESNIKTLWEDLNAIHSKYEEDIASLSEDKKEKRIKVYQGDVCQTINTYCEEVGKEAKTPLVQLLRYLYSRKDDIAVDKIIDGITFLSKKHKVEKQKINPVIQKYPSFNFGNNSKLLGKIISPKDKLKHNLKCNRNQVDNYIWIEIKVLNTKTMRWEKHHYALSSTRFLEEVYYPATSENPPDALAARFRTKTNGYEGKPALSAEQIEQIRSAPVGLRKVKKRQMRLEAARQQNLLPRYTWGKDFNINICKRGNNFEVTLATKVKKKKEKNYKVVLGYDANIVRKNTYAAIEAHANGDGVIDYNDLPVKPIESGFVTVESQVRDKSYDQLSYNGVKLLYCKPHVESRRSFLEKYRNGTMKDNRGNNIQIDFMKDFEAIADDETSLYYFNMKYCKLLQSSIRNHSSQAKEYREEIFELLRDGKLSVLKLSSLSNLSFVMFKVAKSLIGTYFGHLLKKPKNSKSDVKAPPITDEDKQKADPEMFALRLALEEKRLNKVKSKKEVIANKIVAKALELRDKYGPVLIKGENISDTTKKGKKSSTNSFLMDWLARGVANKVKEMVMMHQGLEFVEVNPNFTSHQDPFVHKNPENTFRARYSRCTPSELTEKNRKEILSFLSDKPSKRPTNAYYNEGAMAFLATYGLKKNDVLGVSLEKFKQIMANILHQRSEDQLLFPSRGGMFYLATYKLDADATSVNWNGKQFWVCNADLVAAYNVGLVDIQKDFKKK

SEQ ID NO: 245 - protein, 1054 aa, synthetic construct
  REGION 1..1054: note = Cas12i2 polypeptide sequence
MSSAIKSYKSVLRPNERKNQLLKSTIQCLEDGSAFFFKMLQGLFGGITPEIVRFSTEQEKQQQDIALWCAVNWFRPVSQDSLTHTIASDNLVEKFEEYYGGTASDAIKQYFSASIGESYYWNDCRQQYYDLCRELGVEVSDLTHDLEILCREKCLAVATESNQNNSIISVLFGTGEKEDRSVKLRITKKILEAISNLKEIPKNVAPIQEIILNVAKATKETFRQVYAGNLGAPSTLEKFIAKDGQKEFDLKKLQTDLKKVIRGKSKERDWCCQEELRSYVEQNTIQYDLWAWGEMFNKAHTALKIKSTRNYNFAKQRLEQFKEIQSLNNLLVVKKLNDFFDSEFFSGEETYTICVHHLGGKDLSKLYKAWEDDPADPENAIVVLCDDLKNNFKKEPIRNILRYIFTIRQECSAQDILAAAKYNQQLDRYKSQKANPSVLGNQGFTWTNAVILPEKAQRNDRPNSLDLRIWLYLKLRHPDGRWKKHHIPFYDTRFFQEIYAAGNSPVDTCQFRTPRFGYHLPKLTDQTAIRVNKKHVKAAKTEARIRLAIQQGTLPVSNLKITEISATINSKGQVRIPVKFDVGRQKGTLQIGDRFCGYDQNQTASHAYSLWEVVKEGQYHKELGCFVRFISSGDIVSITENRGNQFDQLSYEGLAYPQYADWRKKASKFVSLWQITKKNKKKEIVTVEAKEKFDAICKYQPRLYKFNKEYAYLLRDIVRGKSLVELQQIRQEIFRFIEQDCGVTRLGSLSLSTLETVKAVKGIIYSYFSTALNASKNNPISDEQRKEFDPELFALLEKLELIRTRKKKQKVERIANSLIQTCLENNIKFIRGEGDLSTTNNATKKKANSRSMDWLARGVFNKIRQLAPMHNITLFGCGSLYTSHQDPLVHRNPDKAMKCRWAAIPVKDIGDWVLRKLSQNLRAKNIGTGEYYHQGVKEFLSHYELQDLEEELLKWRSDRKSNIPCWVLQNRLAEKLGNKEAVVYIPVRGGRIYFATHKVATGAVSIVFDQKQVWVCNADHVAAANIALTVKGIGEQSSDEENPDGSRIKLQLTS

SEQ ID NO: 246 - protein, 4 aa, synthetic construct
  REGION 1..4: note = synthetic peptide sequence
GGGS

SEQ ID NO: 247 - protein, 5 aa, synthetic construct
  REGION 1..5: note = synthetic peptide sequence
GGGGS

SEQ ID NO: 248 - protein, 5 aa, synthetic construct
  REGION 1..5: note = synthetic peptide sequence
EAAAK

SEQ ID NO: 249 - protein, 16 aa, synthetic construct
  REGION 1..16: note = synthetic peptide sequence
SGSETPGTSESATPES

SEQ ID NO: 250 - protein, 6 aa, synthetic construct
  REGION 1..6: note = linker peptide sequence
GGSGGS

SEQ ID NO: 251 - protein, 20 aa, synthetic construct
  REGION 1..20: note = synthetic peptide sequence
GSSGSETPGTSESATPESSG

SEQ ID NO: 252 - DNA, 18 bp, synthetic construct
  misc_feature 1..18: note = synthetic oligonucleotide sequence
  source 1..18: mol_type = other DNA
ggaggctctggaggaagc

SEQ ID NO: 253 - DNA, 60 bp, synthetic construct
  misc_feature 1..60: note = synthetic oligonucleotide sequence
  source 1..60: mol_type = other DNA
ggctcttctggatctgaaacacctggcacaagcgagagcgccacccctgagagctctggc

SEQ ID NO: 254 - protein, 1129 aa, Alicyclobacillus acidiphilus
  REGION 1..1129: note = MISC_FEATURE - AacCas12b polypeptide sequence
MAVKSMKVKLRLDNMPEIRAGLWKLHTEVNAGVRYYTEWLSLLRQENLYRRSPNGDGEQECYKTAEECKAELLERLRARQVENGHCGPAGSDDELLQLARQLYELLVPQAIGAKGDAQQIARKFLSPLADKDAVGGLGIAKAGNKPRWVRMREAGEPGWEEEKAKAEARKSTDRTADVLRALADFGLKPLMRVYTDSDMSSVQWKPLRKGQAVRTWDRDMFQQAIERMMSWESWNQRVGEAYAKLVEQKSRFEQKNFVGQEHLVQLVNQLQQDMKEASHGLESKEQTAHYLTGRALRGSDKVFEKWEKLDPDAPFDLYDTEIKNVQRRNTRRFGSHDLFAKLAEPKYQALWREDASFLTRYAVYNSIVRKLNHAKMFATFTLPDATAHPIWTRFDKLGGNLHQYTFLFNEFGEGRHAIRFQKLLTVEDGVAKEVDDVTVPISMSAQLDDLLPRDPHELVALYFQDYGAEQHLAGEFGGAKIQYRRDQLNHLHARRGARDVYLNLSVRVQSQSEARGERRPPYAAVFRLVGDNHRAFVHFDKLSDYLAEHPDDGKLGSEGLLSGLRVMSVDLGLRTSASISVFRVARKDELKPNSEGRVPFCFPIEGNENLVAVHERSQLLKLPGETESKDLRAIREERQRTLRQLRTQLAYLRLLVRCGSEDVGRRERSWAKLIEQPMDANQMTPDWREAFEDELQKLKSLYGICGDREWTEAVYESVRRVWRHMGKQVRDWRKDVRSGERPKIRGYQKDVVGGNSIEQIEYLERQYKFLKSWSFFGKVSGQVIRAEKGSRFAITLREHIDHAKEDRLKKLADRIIMEALGYVYALDDERGKGKWVAKYPPCQLILLEELSEYQFNNDRPPSENNQLMQWSHRGVFQELLNQAQVHDLLVGTMYAAFSSRFDARTGAPGIRCRRVPARCAREQNPEPFPWWLNKFVAEHKLDGCPLRADDLIPTGEGEFFVSPFSAEEGDFHQIHADLNAAQNLQRRLWSDFDISQIRLRCDWGEVDGEPVLIPRTTGKRTADSYGNKVFYTKTGVTYYERERGKKRRKVFAQEELSEEEAELLVEADEAREKSVVLMRDPSGIINRGDWTRQKEFWSMVNQRIEGYLVKQIRSRVRLQESACENTGDI

SEQ ID NO: 255 - protein, 1140 aa, Bacillus hisashii
  REGION 1..1140: note = MISC_FEATURE - BhCas12b polypeptide sequence
MAPKKKRKVGIHGVPAAATRSFILKIEPNEEVKKGLWKTHEVLNHGIAYYMNILKLIRQEAIYEHHEQDPKNPKKVSKAEIQAELWDFVLKMQKCNSFTHEVDKDEVFNILRELYEELVPSSVEKKGEANQLSNKFLYPLVDPNSQSGKGTASSGRKPRWYNLKIAGDPSWEEEKKKWEEDKKKDPLAKILGKLAEYGLIPLFIPYTDSNEPIVKEIKWMEKSRNQSVRRLDKDMFIQALERFLSWESWNLKVKEEYEKVEKEYKTLEERIKEDIQALKALEQYEKERQEQLLRDTLNTNEYRLSKRGLRGWREIIQKWLKMDENEPSEKYLEVFKDYQRKHPREAGDYSVYEFLSKKENHFIWRNHPEYPYLYATFCEIDKKKKDAKQQATFTLADPINHPLWVRFEERSGSNLNKYRILTEQLHTEKLKKKLTVQLDRLIYPTESGGWEEKGKVDIVLLPSRQFYNQIFLDIEEKGKHAFTYKDESIKFPLKGTLGGARVQFDRDHLRRYPHKVESGNVGRIYFNMTVNIEPTESPVSKSLKIHRDDFPKVVNFKPKELTEWIKDSKGKKLKSGIESLEIGLRVMSIDLGQRQAAAASIFEVVDQKPDIEGKLFFPIKGTELYAVHRASFNIKLPGETLVKSREVLRKAREDNLKLMNQKLNFLRNVLHFQQFEDITEREKRVTKWISRQENSDVPLVYQDELIQIRELMYKPYKDWVAFLKQLHKRLEVEIGKEVKHWRKSLSDGRKGLYGISLKNIDEIDRTRKFLLRWSLRPTEPGEVRRLEPGQRFAIDQLNHLNALKEDRLKKMANTIIMHALGYCYDVRKKKWQAKNPACQIILFEDLSNYNPYEERSRFENSKLMKWSRREIPRQVALQGEIYGLQVGEVGAQFSSRFHAKTGSPGIRCSVVTKEKLQDNRFFKNLQREGRLTLDKIAVLKEGDLYPDKGGEKFISLSKDRKCVTTHADINAAQNLQKRFWTRTHGFYKVYCKAYQVDGQTVYIPESKDQKQKIIEEFGEGYFILKDGVYEWVNAGKLKIKKGSSKQSSSELVDSDILKDSFDLASELKGEKLMLYRDPSGNVFPSDKWMAAGVFFGKLERILISKLTNQYSISTIEDDSSKQSMKRPAATKKAGQAKKKK

SEQ ID NO: 256 - protein, 1108 aa, Bacillus thermoamylovorans
  REGION 1..1108: note = MISC_FEATURE - BTCas12b polypeptide sequence
MATRSFILKIEPNEEVKKGLWKTHEVLNHGIAYYMNILKLIRQEAIYEHHEQDPKNPKKVSKAEIQAELWDFVLKMQKCNSFTHEVDKDVVFNILRELYEELVPSSVEKKGEANQLSNKFLYPLVDPNSQSGKGTASSGRKPRWYNLKIAGDPSWEEEKKKWEEDKKKDPLAKILGKLAEYGLIPLFIPFTDSNEPIVKEIKWMEKSRNQSVRRLDKDMFIQALERFLSWESWNLKVKEEYEKVEKEHKTLEERIKEDIQAFKSLEQYEKERQEQLLRDTLNTNEYRLSKRGLRGWREIIQKWLKMDENEPSEKYLEVFKDYQRKHPREAGDYSVYEFLSKKENHFIWRNHPEYPYLYATFCEIDKKKKDAKQQATFTLADPINHPLWVRFEERSGSNLNKYRILTEQLHTEKLKKKLTVQLDRLIYPTESGGWEEKGKVDIVLLPSRQFYNQIFLDIEEKGKHAFTYKDESIKFPLKGTLGGARVQFDRDHLRRYPHKVESGNVGRIYFNMTVNIEPTESPVSKSLKIHRDDFPKFVNFKPKELTEWIKDSKGKKLKSGIESLEIGLRVMSIDLGQRQAAAASIFEVVDQKPDIEGKLFFPIKGTELYAVHRASFNIKLPGETLVKSREVLRKAREDNLKLMNQKLNFLRNVLHFQQFEDITEREKRVTKWISRQENSDVPLVYQDELIQIRELMYKPYKDWVAFLKQLHKRLEVEIGKEVKHWRKSLSDGRKGLYGISLKNIDEIDRTRKFLLRWSLRPTEPGEVRRLEPGQRFAIDQLNHLNALKEDRLKKMANTIIMHALGYCYDVRKKKWQAKNPACQIILFEDLSNYNPYEERSRFENSKLMKWSRREIPRQVALQGEIYGLQVGEVGAQFSSRFHAKTGSPGIRCSVVTKEKLQDNRFFKNLQREGRLTLDKIAVLKEGDLYPDKGGEKFISLSKDRKLVTTHADINAAQNLQKRFWTRTHGFYKVYCKAYQVDGQTVYIPESKDQKQKIIEEFGEGYFILKDGVYEWGNAGKLKIKKGSSKQSSSELVDSDILKDSFDLASELKGEKLMLYRDPSGNVFPSDKWMAAGVFFGKLERILISKLTNQYSISTIEDDSSKQSM

SEQ ID NO: 257 - protein, 1112 aa, Bacillus sp.
  REGION 1..1112: note = MISC_FEATURE - BvCas12b (Bacillus sp. V3-13) polypeptide sequence
MAIRSIKLKMKTNSGTDSIYLRKALWRTHQLINEGIAYYMNLLTLYRQEAIGDKTKEAYQAELINIIRNQQRNNGSSEEHGSDQEILALLRQLYELIIPSSIGESGDANQLGNKFLYPLVDPNSQSGKGTSNAGRKPRWKRLKEEGNPDWELEKKKDEERKAKDPTVKIFDNLNKYGLLPLFPLFTNIQKDIEWLPLGKRQSVRKWDKDMFIQAIERLLSWESWNRRVADEYKQLKEKTESYYKEHLTGGEEWIEKIRKFEKERNMELEKNAFAPNDGYFITSRQIRGWDRVYEKWSKLPESASPEELWKVVAEQQNKMSEGFGDPKVFSFLANRENRDIWRGHSERIYHIAAYNGLQKKLSRTKEQATFTLPDAIEHPLWIRYESPGGTNLNLFKLEEKQKKNYYVTLSKIIWPSEEKWIEKENIEIPLAPSIQFNRQIKLKQHVKGKQEISFSDYSSRISLDGVLGGSRIQFNRKYIKNHKELLGEGDIGPVFFNLVVDVAPLQETRNGRLQSPIGKALKVISSDFSKVIDYKPKELMDWMNTGSASNSFGVASLLEGMRVMSIDMGQRTSASVSIFEVVKELPKDQEQKLFYSINDTELFAIHKRSFLLNLPGEVVTKNNKQQRQERRKKRQFVRSQIRMLANVLRLETKKTPDERKKAIHKLMEIVQSYDSWTASQKEVWEKELNLLTNMAAFNDEIWKESLVELHHRIEPYVGQIVSKWRKGLSEGRKNLAGISMWNIDELEDTRRLLISWSKRSRTPGEANRIETDEPFGSSLLQHIQNVKDDRLKQMANLIIMTALGFKYDKEEKDRYKRWKETYPACQIILFENLNRYLFNLDRSRRENSRLMKWAHRSIPRTVSMQGEMFGLQVGDVRSEYSSRFHAKTGAPGIRCHALTEEDLKAGSNTLKRLIEDGFINESELAYLKKGDIIPSQGGELFVTLSKRYKKDSDNNELTVIHADINAAQNLQKRFWQQNSEVYRVPCQLARMGEDKLYIPKSQTETIKKYFGKGSFVKNNTEQEVYKWEKSEKMKIKTDTTFDLQDLDGFEDISKTIELAQEQQKKYLTMFRDPSGYFFNNETWRPQKEYWSIVNNIIKSCLKKKILSNKVEL

SEQ ID NO: 258 - DNA, 47 bp, synthetic construct
  misc_feature 1..47: note = 5'UTR oligonucleotide sequence
  source 1..47: mol_type = other DNA
gggaaataagagagaaaagaagagtaagaagaaatataagagccacc

SEQ ID NO: 259 - DNA, 101 bp, synthetic construct
  misc_feature 1..101: note = 3'UTR (TriLink standard UTR)polynucleotide sequence
  source 1..101: mol_type = other DNA
gctggagcctcggtggccatgcttcttgccccttgggcctccccccagcccctcctccccttcctgcacccgtacccccgtggtctttgaataaagtctga

SEQ ID NO: 260 - DNA, 3420 bp, Bacillus hisashii
  misc_feature 1..3420: note = bhCas12b (V4) polynucleotide sequence
  source 1..3420: mol_type = genomic DNA
atggccccaaagaagaagcggaaggtcggtatccacggagtcccagcagccgccaccagatccttcatcctgaagatcgagcccaacgaggaagtgaagaaaggcctctggaaaacccacgaggtgctgaaccacggaatcgcctactacatgaatatcctgaagctgatccggcaagaggccatctacgagcaccacgagcaggaccccaagaatcccaagaaggtgtccaaggccgagatccaggccgagctgtgggatttcgtgctgaagatgcagaagtgcaacagcttcacacacgaggtggacaaggacgaggtgttcaacatcctgagagagctgtacgaggaactggtgcccagcagcgtggaaaagaagggcgaagccaaccagctgagcaacaagtttctgtaccctctggtggaccccaacagccagtctggaaagggaacagccagcagcggcagaaagcccagatggtacaacctgaagattgccggcgatccctcctgggaagaagagaagaagaagtgggaagaagataagaaaaaggacccgctggccaagatcctgggcaagctggctgagtacggactgatccctctgttcatcccctacaccgacagcaacgagcccatcgtgaaagaaatcaagtggatggaaaagtcccggaaccagagcgtgcggcggctggataaggacatgttcattcaggccctggaacggttcctgagctgggagagctggaacctgaaagtgaaagaggaatacgagaaggtcgagaaagagtacaagaccctggaagagaggatcaaagaggacatccaggctctgaaggctctggaacagtatgagaaagagcggcaagaacagctgctgcgggacaccctgaacaccaacgagtaccggctgagcaagagaggccttagaggctggcgggaaatcatccagaaatggctgaaaatggacgagaacgagccctccgagaagtacctggaagtgttcaaggactaccagcggaagcaccctagagaggccggcgattacagcgtgtacgagttcctgtccaagaaagagaaccacttcatctggcggaatcaccctgagtacccctacctgtacgccaccttctgcgagatcgacaagaaaaagaaggacgccaagcagcaggccaccttcacactggccgatcctatcaatcaccctctgtgggtccgattcgaggaaagaagcggcagcaacctgaacaagtacagaatcctgaccgagcagctgcacaccgagaagctgaagaaaaagctgacagtgcagctggaccggctgatctaccctacagaatctggcggctgggaagagaagggcaaagtggacattgtgctgctgcccagccggcagttctacaaccagatcttcctggacatcgaggaaaagggcaagcacgccttcacctacaaggatgagagcatcaagttccctctgaagggcacactcggcggagccagagtgcagttcgacagagatcacctgagaagataccctcacaaggtggaaagcggcaacgtgggcagaatctacttcaacatgaccgtgaacatcgagcctacagagtccccagtgtccaagtctctgaagatccaccgggacgacttccccaaggtggtcaacttcaagcccaaagaactgaccgagtggatcaaggacagcaagggcaagaaactgaagtccggcatcgagtccctggaaatcggcctgagagtgatgagcatcgacctgggacagagacaggccgctgccgcctctattttcgaggtggtggatcagaagcccgacatcgaaggcaagctgtttttcccaatcaagggcaccgagctgtatgccgtgcacagagccagcttcaacatcaagctgcccggcgagacactggtcaagagcagagaagtgctgcggaaggccagagaggacaatctgaaactgatgaaccagaagctcaacttcctgcggaacgtgctgcacttccagcagttcgaggacatcaccgagagagagaagcgggtcaccaagtggatcagcagacaagagaacagcgacgtgcccctggtgtaccaggatgagctgatccagatccgcgagctgatgtacaagccttacaaggactgggtcgccttcctgaagcagctccacaagagactggaagtcgagatcggcaaagaagtgaagcactggcggaagtccctgagcgacggaagaaagggcctgtacggcatctccctgaagaacatcgacgagatcgatcggacccggaagttcctgctgagatggtccctgaggcctaccgaacctggcgaagtgcgtagactggaacccggccagagattcgccatcgaccagctgaatcacctgaacgccctgaaagaagatcggctgaagaagatggccaacaccatcatcatgcacgccctgggctactgctacgacgtgcggaagaagaaatggcaggctaagaaccccgcctgccagatcatcctgttcgaggatctgagcaactacaacccctacgaggaaaggtcccgcttcgagaacagcaagctcatgaagtggtccagacgcgagatccccagacaggttgcactgcagggcgagatctatggcctgcaagtgggagaagtgggcgctcagttcagcagcagattccacgccaagacaggcagccctggcatcagatgtagcgtcgtgaccaaagagaagctgcaggacaatcggttcttcaagaatctgcagagagagggcagactgaccctggacaaaatcgccgtgctgaaagagggcgatctgtacccagacaaaggcggcgagaagttcatcagcctgagcaaggatcggaagtgcgtgaccacacacgccgacatcaacgccgctcagaacctgcagaagcggttctggacaagaacccacggcttctacaaggtgtactgcaaggcctaccaggtggacggccagaccgtgtacatccctgagagcaaggaccagaagcagaagatcatcgaagagttcggcgagggctacttcattctgaaggacggggtgtacgaatgggtcaacgccggcaagctgaaaatcaagaagggcagctccaagcagagcagcagcgagctggtggatagcgacatcctgaaagacagcttcgacctggcctccgagctgaaaggcgaaaagctgatgctgtacagggaccccagcggcaatgtgttccccagcgacaaatggatggccgctggcgtgttcttcggaaagctggaacgcatcctgatcagcaagctgaccaaccagtactccatcagcaccatcgaggacgacagcagcaagcagtctatgaaaaggccggcggccacgaaaaaggccggccaggcaaaaaagaaaaag

SEQ ID NO: 261 - protein, 17 aa, synthetic construct
  REGION 1..17: note = synthetic peptide sequence
MAPKKKRKVGIHGVPAA

SEQ ID NO: 262 - DNA, 51 bp, synthetic construct
  misc_feature 1..51: note = synthetic oligonucleotide sequence
  source 1..51: mol_type = other DNA
atggccccaaagaagaagcggaaggtcggtatccacggagtcccagcagcc

SEQ ID NO: 263 - protein, 1554 aa, synthetic construct
  REGION 1..1554: note = 101 Cas9 TadAins 1015 polypeptide sequence
MDKKYSIGLAIGTNSVGWAVITDEYKVPSKKFKVLGNTDRHSIKKNLIGALLFDSGETAEATRLKRTARRRYTRRKNRICYLQEIFSNEMAKVDDSFFHRLEESFLVEEDKKHERHPIFGNIVDEVAYHEKYPTIYHLRKKLVDSTDKADLRLIYLALAHMIKFRGHFLIEGDLNPDNSDVDKLFIQLVQTYNQLFEENPINASGVDAKAILSARLSKSRRLENLIAQLPGEKKNGLFGNLIALSLGLTPNFKSNFDLAEDAKLQLSKDTYDDDLDNLLAQIGDQYADLFLAAKNLSDAILLSDILRVNTEITKAPLSASMIKRYDEHHQDLTLLKALVRQQLPEKYKEIFFDQSKNGYAGYIDGGASQEEFYKFIKPILEKMDGTEELLVKLNREDLLRKQRTFDNGSIPHQIHLGELHAILRRQEDFYPFLKDNREKIEKILTFRIPYYVGPLARGNSRFAWMTRKSEETITPWNFEEVVDKGASAQSFIERMTNFDKNLPNEKVLPKHSLLYEYFTVYNELTKVKYVTEGMRKPAFLSGEQKKAIVDLLFKTNRKVTVKQLKEDYFKKIECFDSVEISGVEDRFNASLGTYHDLLKIIKDKDFLDNEENEDILEDIVLTLTLFEDREMIEERLKTYAHLFDDKVMKQLKRRRYTGWGRLSRKLINGIRDKQSGKTILDFLKSDGFANRNFMQLIHDDSLTFKEDIQKAQVSGQGDSLHEHIANLAGSPAIKKGILQTVKVVDELVKVMGRHKPENIVIEMARENQTTQKGQKNSRERMKRIEEGIKELGSQILKEHPVENTQLQNEKLYLYYLQNGRDMYVDQELDINRLSDYDVDHIVPQSFLKDDSIDNKVLTRSDKNRGKSDNVPSEEVVKKMKNYWRQLLNAKLITQRKFDNLTKAERGGLSELDKAGFIKRQLVETRQITKHVAQILDSRMNTKYDENDKLIREVKVITLKSKLVSDFRKDFQFYKVREINNYHHAHDAYLNAVVGTALIKKYPKLESEFVYGDYKVGSSGSETPGTSESATPESSGSEVEFSHEYWMRHALTLAKRARDEREVPVGAVLVLNNRVIGEGWNRAIGLHDPTAHAEIMALRQGGLVMQNYRLIDATLYVTFEPCVMCAGAMIHSRIGRVVFGVRNAKTGAAGSLMDVLHYPGMNHRVEITEGILADECAALLCYFFRMPRQVFNAQKKAQSSTDYDVRKMIAKSEQEIGKATAKYFFYSNIMNFFKTEITLANGEIRKRPLIETNGETGEIVWDKGRDFATVRKVLSMPQVNIVKKTEVQTGGFSKESILPKRNSDKLIARKKDWDPKKYGGFDSPTVAYSVLVVAKVEKGKSKKLKSVKELLGITIMERSSFEKNPIDFLEAKGYKEVKKDLIIKLPKYSLFELENGRKRMLASAGELQKGNELALPSKYVNFLYLASHYEKLKGSPEDNEQKQLFVEQHKHYLDEIIEQISEFSKRVILADANLDKVLSAYNKHRDKPIREQAENIIHLFTLTNLGAPAAFKYFDTTIDRKRYTSTKEVLDATLIHQSITGLYETRIDLSQLGGD

SEQ ID NO: 264 - protein, 1554 aa, synthetic construct
  REGION 1..1554: note = 102 Cas9 TadAins 1022 polypeptide sequence
MDKKYSIGLAIGTNSVGWAVITDEYKVPSKKFKVLGNTDRHSIKKNLIGALLFDSGETAEATRLKRTARRRYTRRKNRICYLQEIFSNEMAKVDDSFFHRLEESFLVEEDKKHERHPIFGNIVDEVAYHEKYPTIYHLRKKLVDSTDKADLRLIYLALAHMIKFRGHFLIEGDLNPDNSDVDKLFIQLVQTYNQLFEENPINASGVDAKAILSARLSKSRRLENLIAQLPGEKKNGLFGNLIALSLGLTPNFKSNFDLAEDAKLQLSKDTYDDDLDNLLAQIGDQYADLFLAAKNLSDAILLSDILRVNTEITKAPLSASMIKRYDEHHQDLTLLKALVRQQLPEKYKEIFFDQSKNGYAGYIDGGASQEEFYKFIKPILEKMDGTEELLVKLNREDLLRKQRTFDNGSIPHQIHLGELHAILRRQEDFYPFLKDNREKIEKILTFRIPYYVGPLARGNSRFAWMTRKSEETITPWNFEEVVDKGASAQSFIERMTNFDKNLPNEKVLPKHSLLYEYFTVYNELTKVKYVTEGMRKPAFLSGEQKKAIVDLLFKTNRKVTVKQLKEDYFKKIECFDSVEISGVEDRFNASLGTYHDLLKIIKDKDFLDNEENEDILEDIVLTLTLFEDREMIEERLKTYAHLFDDKVMKQLKRRRYTGWGRLSRKLINGIRDKQSGKTILDFLKSDGFANRNFMQLIHDDSLTFKEDIQKAQVSGQGDSLHEHIANLAGSPAIKKGILQTVKVVDELVKVMGRHKPENIVIEMARENQTTQKGQKNSRERMKRIEEGIKELGSQILKEHPVENTQLQNEKLYLYYLQNGRDMYVDQELDINRLSDYDVDHIVPQSFLKDDSIDNKVLTRSDKNRGKSDNVPSEEVVKKMKNYWRQLLNAKLITQRKFDNLTKAERGGLSELDKAGFIKRQLVETRQITKHVAQILDSRMNTKYDENDKLIREVKVITLKSKLVSDFRKDFQFYKVREINNYHHAHDAYLNAVVGTALIKKYPKLESEFVYGDYKVYDVRKMIGSSGSETPGTSESATPESSGSEVEFSHEYWMRHALTLAKRARDEREVPVGAVLVLNNRVIGEGWNRAIGLHDPTAHAEIMALRQGGLVMQNYRLIDATLYVTFEPCVMCAGAMIHSRIGRVVFGVRNAKTGAAGSLMDVLHYPGMNHRVEITEGILADECAALLCYFFRMPRQVFNAQKKAQSSTDAKSEQEIGKATAKYFFYSNIMNFFKTEITLANGEIRKRPLIETNGETGEIVWDKGRDFATVRKVLSMPQVNIVKKTEVQTGGFSKESILPKRNSDKLIARKKDWDPKKYGGFDSPTVAYSVLVVAKVEKGKSKKLKSVKELLGITIMERSSFEKNPIDFLEAKGYKEVKKDLIIKLPKYSLFELENGRKRMLASAGELQKGNELALPSKYVNFLYLASHYEKLKGSPEDNEQKQLFVEQHKHYLDEIIEQISEFSKRVILADANLDKVLSAYNKHRDKPIREQAENIIHLFTLTNLGAPAAFKYFDTTIDRKRYTSTKEVLDATLIHQSITGLYETRIDLSQLGGD

SEQ ID NO: 265 - protein, 1554 aa, synthetic construct
  REGION 1..1554: note = 103 Cas9 TadAins 1029 polypeptide sequence
MDKKYSIGLAIGTNSVGWAVITDEYKVPSKKFKVLGNTDRHSIKKNLIGALLFDSGETAEATRLKRTARRRYTRRKNRICYLQEIFSNEMAKVDDSFFHRLEESFLVEEDKKHERHPIFGNIVDEVAYHEKYPTIYHLRKKLVDSTDKADLRLIYLALAHMIKFRGHFLIEGDLNPDNSDVDKLFIQLVQTYNQLFEENPINASGVDAKAILSARLSKSRRLENLIAQLPGEKKNGLFGNLIALSLGLTPNFKSNFDLAEDAKLQLSKDTYDDDLDNLLAQIGDQYADLFLAAKNLSDAILLSDILRVNTEITKAPLSASMIKRYDEHHQDLTLLKALVRQQLPEKYKEIFFDQSKNGYAGYIDGGASQEEFYKFIKPILEKMDGTEELLVKLNREDLLRKQRTFDNGSIPHQIHLGELHAILRRQEDFYPFLKDNREKIEKILTFRIPYYVGPLARGNSRFAWMTRKSEETITPWNFEEVVDKGASAQSFIERMTNFDKNLPNEKVLPKHSLLYEYFTVYNELTKVKYVTEGMRKPAFLSGEQKKAIVDLLFKTNRKVTVKQLKEDYFKKIECFDSVEISGVEDRFNASLGTYHDLLKIIKDKDFLDNEENEDILEDIVLTLTLFEDREMIEERLKTYAHLFDDKVMKQLKRRRYTGWGRLSRKLINGIRDKQSGKTILDFLKSDGFANRNFMQLIHDDSLTFKEDIQKAQVSGQGDSLHEHIANLAGSPAIKKGILQTVKVVDELVKVMGRHKPENIVIEMARENQTTQKGQKNSRERMKRIEEGIKELGSQILKEHPVENTQLQNEKLYLYYLQNGRDMYVDQELDINRLSDYDVDHIVPQSFLKDDSIDNKVLTRSDKNRGKSDNVPSEEVVKKMKNYWRQLLNAKLITQRKFDNLTKAERGGLSELDKAGFIKRQLVETRQITKHVAQILDSRMNTKYDENDKLIREVKVITLKSKLVSDFRKDFQFYKVREINNYHHAHDAYLNAVVGTALIKKYPKLESEFVYGDYKVYDVRKMIAKSEQEIGSSGSETPGTSESATPESSGSEVEFSHEYWMRHALTLAKRARDEREVPVGAVLVLNNRVIGEGWNRAIGLHDPTAHAEIMALRQGGLVMQNYRLIDATLYVTFEPCVMCAGAMIHSRIGRVVFGVRNAKTGAAGSLMDVLHYPGMNHRVEITEGILADECAALLCYFFRMPRQVFNAQKKAQSSTDGKATAKYFFYSNIMNFFKTEITLANGEIRKRPLIETNGETGEIVWDKGRDFATVRKVLSMPQVNIVKKTEVQTGGFSKESILPKRNSDKLIARKKDWDPKKYGGFDSPTVAYSVLVVAKVEKGKSKKLKSVKELLGITIMERSSFEKNPIDFLEAKGYKEVKKDLIIKLPKYSLFELENGRKRMLASAGELQKGNELALPSKYVNFLYLASHYEKLKGSPEDNEQKQLFVEQHKHYLDEIIEQISEFSKRVILADANLDKVLSAYNKHRDKPIREQAENIIHLFTLTNLGAPAAFKYFDTTIDRKRYTSTKEVLDATLIHQSITGLYETRIDLSQLGGD

SEQ ID NO: 266 - protein, 1554 aa, synthetic construct
  REGION 1..1554: note = 103 Cas9 TadAins 1040 polypeptide sequence
MDKKYSIGLAIGTNSVGWAVITDEYKVPSKKFKVLGNTDRHSIKKNLIGALLFDSGETAEATRLKRTARRRYTRRKNRICYLQEIFSNEMAKVDDSFFHRLEESFLVEEDKKHERHPIFGNIVDEVAYHEKYPTIYHLRKKLVDSTDKADLRLIYLALAHMIKFRGHFLIEGDLNPDNSDVDKLFIQLVQTYNQLFEENPINASGVDAKAILSARLSKSRRLENLIAQLPGEKKNGLFGNLIALSLGLTPNFKSNFDLAEDAKLQLSKDTYDDDLDNLLAQIGDQYADLFLAAKNLSDAILLSDILRVNTEITKAPLSASMIKRYDEHHQDLTLLKALVRQQLPEKYKEIFFDQSKNGYAGYIDGGASQEEFYKFIKPILEKMDGTEELLVKLNREDLLRKQRTFDNGSIPHQIHLGELHAILRRQEDFYPFLKDNREKIEKILTFRIPYYVGPLARGNSRFAWMTRKSEETITPWNFEEVVDKGASAQSFIERMTNFDKNLPNEKVLPKHSLLYEYFTVYNELTKVKYVTEGMRKPAFLSGEQKKAIVDLLFKTNRKVTVKQLKEDYFKKIECFDSVEISGVEDRFNASLGTYHDLLKIIKDKDFLDNEENEDILEDIVLTLTLFEDREMIEERLKTYAHLFDDKVMKQLKRRRYTGWGRLSRKLINGIRDKQSGKTILDFLKSDGFANRNFMQLIHDDSLTFKEDIQKAQVSGQGDSLHEHIANLAGSPAIKKGILQTVKVVDELVKVMGRHKPENIVIEMARENQTTQKGQKNSRERMKRIEEGIKELGSQILKEHPVENTQLQNEKLYLYYLQNGRDMYVDQELDINRLSDYDVDHIVPQSFLKDDSIDNKVLTRSDKNRGKSDNVPSEEVVKKMKNYWRQLLNAKLITQRKFDNLTKAERGGLSELDKAGFIKRQLVETRQITKHVAQILDSRMNTKYDENDKLIREVKVITLKSKLVSDFRKDFQFYKVREINNYHHAHDAYLNAVVGTALIKKYPKLESEFVYGDYKVYDVRKMIAKSEQEIGKATAKYFFYSGSSGSETPGTSESATPESSGSEVEFSHEYWMRHALTLAKRARDEREVPVGAVLVLNNRVIGEGWNRAIGLHDPTAHAEIMALRQGGLVMQNYRLIDATLYVTFEPCVMCAGAMIHSRIGRVVFGVRNAKTGAAGSLMDVLHYPGMNHRVEITEGILADECAALLCYFFRMPRQVFNAQKKAQSSTDNIMNFFKTEITLANGEIRKRPLIETNGETGEIVWDKGRDFATVRKVLSMPQVNIVKKTEVQTGGFSKESILPKRNSDKLIARKKDWDPKKYGGFDSPTVAYSVLVVAKVEKGKSKKLKSVKELLGITIMERSSFEKNPIDFLEAKGYKEVKKDLIIKLPKYSLFELENGRKRMLASAGELQKGNELALPSKYVNFLYLASHYEKLKGSPEDNEQKQLFVEQHKHYLDEIIEQISEFSKRVILADANLDKVLSAYNKHRDKPIREQAENIIHLFTLTNLGAPAAFKYFDTTIDRKRYTSTKEVLDATLIHQSITGLYETRIDLSQLGGD

SEQ ID NO: 267 - protein, 1554 aa, synthetic construct
  REGION 1..1554: note = 105 Cas9 TadAins 1068 polypeptide sequence
MDKKYSIGLAIGTNSVGWAVITDEYKVPSKKFKVLGNTDRHSIKKNLIGALLFDSGETAEATRLKRTARRRYTRRKNRICYLQEIFSNEMAKVDDSFFHRLEESFLVEEDKKHERHPIFGNIVDEVAYHEKYPTIYHLRKKLVDSTDKADLRLIYLALAHMIKFRGHFLIEGDLNPDNSDVDKLFIQLVQTYNQLFEENPINASGVDAKAILSARLSKSRRLENLIAQLPGEKKNGLFGNLIALSLGLTPNFKSNFDLAEDAKLQLSKDTYDDDLDNLLAQIGDQYADLFLAAKNLSDAILLSDILRVNTEITKAPLSASMIKRYDEHHQDLTLLKALVRQQLPEKYKEIFFDQSKNGYAGYIDGGASQEEFYKFIKPILEKMDGTEELLVKLNREDLLRKQRTFDNGSIPHQIHLGELHAILRRQEDFYPFLKDNREKIEKILTFRIPYYVGPLARGNSRFAWMTRKSEETITPWNFEEVVDKGASAQSFIERMTNFDKNLPNEKVLPKHSLLYEYFTVYNELTKVKYVTEGMRKPAFLSGEQKKAIVDLLFKTNRKVTVKQLKEDYFKKIECFDSVEISGVEDRFNASLGTYHDLLKIIKDKDFLDNEENEDILEDIVLTLTLFEDREMIEERLKTYAHLFDDKVMKQLKRRRYTGWGRLSRKLINGIRDKQSGKTILDFLKSDGFANRNFMQLIHDDSLTFKEDIQKAQVSGQGDSLHEHIANLAGSPAIKKGILQTVKVVDELVKVMGRHKPENIVIEMARENQTTQKGQKNSRERMKRIEEGIKELGSQILKEHPVENTQLQNEKLYLYYLQNGRDMYVDQELDINRLSDYDVDHIVPQSFLKDDSIDNKVLTRSDKNRGKSDNVPSEEVVKKMKNYWRQLLNAKLITQRKFDNLTKAERGGLSELDKAGFIKRQLVETRQITKHVAQILDSRMNTKYDENDKLIREVKVITLKSKLVSDFRKDFQFYKVREINNYHHAHDAYLNAVVGTALIKKYPKLESEFVYGDYKVYDVRKMIAKSEQEIGKATAKYFFYSNIMNFFKTEITLANGEIRKRPLIETNGEGSSGSETPGTSESATPESSGSEVEFSHEYWMRHALTLAKRARDEREVPVGAVLVLNNRVIGEGWNRAIGLHDPTAHAEIMALRQGGLVMQNYRLIDATLYVTFEPCVMCAGAMIHSRIGRVVFGVRNAKTGAAGSLMDVLHYPGMNHRVEITEGILADECAALLCYFFRMPRQVFNAQKKAQSSTDTGEIVWDKGRDFATVRKVLSMPQVNIVKKTEVQTGGFSKESILPKRNSDKLIARKKDWDPKKYGGFDSPTVAYSVLVVAKVEKGKSKKLKSVKELLGITIMERSSFEKNPIDFLEAKGYKEVKKDLIIKLPKYSLFELENGRKRMLASAGELQKGNELALPSKYVNFLYLASHYEKLKGSPEDNEQKQLFVEQHKHYLDEIIEQISEFSKRVILADANLDKVLSAYNKHRDKPIREQAENIIHLFTLTNLGAPAAFKYFDTTIDRKRYTSTKEVLDATLIHQSITGLYETRIDLSQLGGD

SEQ ID NO: 268 - protein, 1554 aa, synthetic construct
  REGION 1..1554: note = 106 Cas9 TadAins 1247 polypeptide sequence
MDKKYSIGLAIGTNSVGWAVITDEYKVPSKKFKVLGNTDRHSIKKNLIGALLFDSGETAEATRLKRTARRRYTRRKNRICYLQEIFSNEMAKVDDSFFHRLEESFLVEEDKKHERHPIFGNIVDEVAYHEKYPTIYHLRKKLVDSTDKADLRLIYLALAHMIKFRGHFLIEGDLNPDNSDVDKLFIQLVQTYNQLFEENPINASGVDAKAILSARLSKSRRLENLIAQLPGEKKNGLFGNLIALSLGLTPNFKSNFDLAEDAKLQLSKDTYDDDLDNLLAQIGDQYADLFLAAKNLSDAILLSDILRVNTEITKAPLSASMIKRYDEHHQDLTLLKALVRQQLPEKYKEIFFDQSKNGYAGYIDGGASQEEFYKFIKPILEKMDGTEELLVKLNREDLLRKQRTFDNGSIPHQIHLGELHAILRRQEDFYPFLKDNREKIEKILTFRIPYYVGPLARGNSRFAWMTRKSEETITPWNFEEVVDKGASAQSFIERMTNFDKNLPNEKVLPKHSLLYEYFTVYNELTKVKYVTEGMRKPAFLSGEQKKAIVDLLFKTNRKVTVKQLKEDYFKKIECFDSVEISGVEDRFNASLGTYHDLLKIIKDKDFLDNEENEDILEDIVLTLTLFEDREMIEERLKTYAHLFDDKVMKQLKRRRYTGWGRLSRKLINGIRDKQSGKTILDFLKSDGFANRNFMQLIHDDSLTFKEDIQKAQVSGQGDSLHEHIANLAGSPAIKKGILQTVKVVDELVKVMGRHKPENIVIEMARENQTTQKGQKNSRERMKRIEEGIKELGSQILKEHPVENTQLQNEKLYLYYLQNGRDMYVDQELDINRLSDYDVDHIVPQSFLKDDSIDNKVLTRSDKNRGKSDNVPSEEVVKKMKNYWRQLLNAKLITQRKFDNLTKAERGGLSELDKAGFIKRQLVETRQITKHVAQILDSRMNTKYDENDKLIREVKVITLKSKLVSDFRKDFQFYKVREINNYHHAHDAYLNAVVGTALIKKYPKLESEFVYGDYKVYDVRKMIAKSEQEIGKATAKYFFYSNIMNFFKTEITLANGEIRKRPLIETNGETGEIVWDKGRDFATVRKVLSMPQVNIVKKTEVQTGGFSKESILPKRNSDKLIARKKDWDPKKYGGFDSPTVAYSVLVVAKVEKGKSKKLKSVKELLGITIMERSSFEKNPIDFLEAKGYKEVKKDLIIKLPKYSLFELENGRKRMLASAGELQKGNELALPSKYVNFLYLASHYEKLKGGSSGSETPGTSESATPESSGSEVEFSHEYWMRHALTLAKRARDEREVPVGAVLVLNNRVIGEGWNRAIGLHDPTAHAEIMALRQGGLVMQNYRLIDATLYVTFEPCVMCAGAMIHSRIGRVVFGVRNAKTGAAGSLMDVLHYPGMNHRVEITEGILADECAALLCYFFRMPRQVFNAQKKAQSSTDSPEDNEQKQLFVEQHKHYLDEIIEQISEFSKRVILADANLDKVLSAYNKHRDKPIREQAENIIHLFTLTNLGAPAAFKYFDTTIDRKRYTSTKEVLDATLIHQSITGLYETRIDLSQLGGD

SEQ ID NO: 269 - protein, 1554 aa, synthetic construct
  REGION 1..1554: note = 107 Cas9 TadAins 1054 polypeptide sequence
MDKKYSIGLAIGTNSVGWAVITDEYKVPSKKFKVLGNTDRHSIKKNLIGALLFDSGETAEATRLKRTARRRYTRRKNRICYLQEIFSNEMAKVDDSFFHRLEESFLVEEDKKHERHPIFGNIVDEVAYHEKYPTIYHLRKKLVDSTDKADLRLIYLALAHMIKFRGHFLIEGDLNPDNSDVDKLFIQLVQTYNQLFEENPINASGVDAKAILSARLSKSRRLENLIAQLPGEKKNGLFGNLIALSLGLTPNFKSNFDLAEDAKLQLSKDTYDDDLDNLLAQIGDQYADLFLAAKNLSDAILLSDILRVNTEITKAPLSASMIKRYDEHHQDLTLLKALVRQQLPEKYKEIFFDQSKNGYAGYIDGGASQEEFYKFIKPILEKMDGTEELLVKLNREDLLRKQRTFDNGSIPHQIHLGELHAILRRQEDFYPFLKDNREKIEKILTFRIPYYVGPLARGNSRFAWMTRKSEETITPWNFEEVVDKGASAQSFIERMTNFDKNLPNEKVLPKHSLLYEYFTVYNELTKVKYVTEGMRKPAFLSGEQKKAIVDLLFKTNRKVTVKQLKEDYFKKIECFDSVEISGVEDRFNASLGTYHDLLKIIKDKDFLDNEENEDILEDIVLTLTLFEDREMIEERLKTYAHLFDDKVMKQLKRRRYTGWGRLSRKLINGIRDKQSGKTILDFLKSDGFANRNFMQLIHDDSLTFKEDIQKAQVSGQGDSLHEHIANLAGSPAIKKGILQTVKVVDELVKVMGRHKPENIVIEMARENQTTQKGQKNSRERMKRIEEGIKELGSQILKEHPVENTQLQNEKLYLYYLQNGRDMYVDQELDINRLSDYDVDHIVPQSFLKDDSIDNKVLTRSDKNRGKSDNVPSEEVVKKMKNYWRQLLNAKLITQRKFDNLTKAERGGLSELDKAGFIKRQLVETRQITKHVAQILDSRMNTKYDENDKLIREVKVITLKSKLVSDFRKDFQFYKVREINNYHHAHDAYLNAVVGTALIKKYPKLESEFVYGDYKVYDVRKMIAKSEQEIGKATAKYFFYSNIMNFFKTEITLANGSSGSETPGTSESATPESSGSEVEFSHEYWMRHALTLAKRARDEREVPVGAVLVLNNRVIGEGWNRAIGLHDPTAHAEIMALRQGGLVMQNYRLIDATLYVTFEPCVMCAGAMIHSRIGRVVFGVRNAKTGAAGSLMDVLHYPGMNHRVEITEGILADECAALLCYFFRMPRQVFNAQKKAQSSTDGEIRKRPLIETNGETGEIVWDKGRDFATVRKVLSMPQVNIVKKTEVQTGGFSKESILPKRNSDKLIARKKDWDPKKYGGFDSPTVAYSVLVVAKVEKGKSKKLKSVKELLGITIMERSSFEKNPIDFLEAKGYKEVKKDLIIKLPKYSLFELENGRKRMLASAGELQKGNELALPSKYVNFLYLASHYEKLKGSPEDNEQKQLFVEQHKHYLDEIIEQISEFSKRVILADANLDKVLSAYNKHRDKPIREQAENIIHLFTLTNLGAPAAFKYFDTTIDRKRYTSTKEVLDATLIHQSITGLYETRIDLSQLGGD

SEQ ID NO: 270 - protein, 1554 aa, synthetic construct
  REGION 1..1554: note = 108 Cas9 TadAins 1026 polypeptide sequence
MDKKYSIGLAIGTNSVGWAVITDEYKVPSKKFKVLGNTDRHSIKKNLIGALLFDSGETAEATRLKRTARRRYTRRKNRICYLQEIFSNEMAKVDDSFFHRLEESFLVEEDKKHERHPIFGNIVDEVAYHEKYPTIYHLRKKLVDSTDKADLRLIYLALAHMIKFRGHFLIEGDLNPDNSDVDKLFIQLVQTYNQLFEENPINASGVDAKAILSARLSKSRRLENLIAQLPGEKKNGLFGNLIALSLGLTPNFKSNFDLAEDAKLQLSKDTYDDDLDNLLAQIGDQYADLFLAAKNLSDAILLSDILRVNTEITKAPLSASMIKRYDEHHQDLTLLKALVRQQLPEKYKEIFFDQSKNGYAGYIDGGASQEEFYKFIKPILEKMDGTEELLVKLNREDLLRKQRTFDNGSIPHQIHLGELHAILRRQEDFYPFLKDNREKIEKILTFRIPYYVGPLARGNSRFAWMTRKSEETITPWNFEEVVDKGASAQSFIERMTNFDKNLPNEKVLPKHSLLYEYFTVYNELTKVKYVTEGMRKPAFLSGEQKKAIVDLLFKTNRKVTVKQLKEDYFKKIECFDSVEISGVEDRFNASLGTYHDLLKIIKDKDFLDNEENEDILEDIVLTLTLFEDREMIEERLKTYAHLFDDKVMKQLKRRRYTGWGRLSRKLINGIRDKQSGKTILDFLKSDGFANRNFMQLIHDDSLTFKEDIQKAQVSGQGDSLHEHIANLAGSPAIKKGILQTVKVVDELVKVMGRHKPENIVIEMARENQTTQKGQKNSRERMKRIEEGIKELGSQILKEHPVENTQLQNEKLYLYYLQNGRDMYVDQELDINRLSDYDVDHIVPQSFLKDDSIDNKVLTRSDKNRGKSDNVPSEEVVKKMKNYWRQLLNAKLITQRKFDNLTKAERGGLSELDKAGFIKRQLVETRQITKHVAQILDSRMNTKYDENDKLIREVKVITLKSKLVSDFRKDFQFYKVREINNYHHAHDAYLNAVVGTALIKKYPKLESEFVYGDYKVYDVRKMIAKSEGSSGSETPGTSESATPESSGSEVEFSHEYWMRHALTLAKRARDEREVPVGAVLVLNNRVIGEGWNRAIGLHDPTAHAEIMALRQGGLVMQNYRLIDATLYVTFEPCVMCAGAMIHSRIGRVVFGVRNAKTGAAGSLMDVLHYPGMNHRVEITEGILADECAALLCYFFRMPRQVFNAQKKAQSSTDQEIGKATAKYFFYSNIMNFFKTEITLANGEIRKRPLIETNGETGEIVWDKGRDFATVRKVLSMPQVNIVKKTEVQTGGFSKESILPKRNSDKLIARKKDWDPKKYGGFDSPTVAYSVLVVAKVEKGKSKKLKSVKELLGITIMERSSFEKNPIDFLEAKGYKEVKKDLIIKLPKYSLFELENGRKRMLASAGELQKGNELALPSKYVNFLYLASHYEKLKGSPEDNEQKQLFVEQHKHYLDEIIEQISEFSKRVILADANLDKVLSAYNKHRDKPIREQAENIIHLFTLTNLGAPAAFKYFDTTIDRKRYTSTKEVLDATLIHQSITGLYETRIDLSQLGGD

SEQ ID NO: 271 - protein, 1540 aa, synthetic construct
  REGION 1..1540: note = 109 Cas9 TadAins 768 polypeptide sequence
MDKKYSIGLAIGTNSVGWAVITDEYKVPSKKFKVLGNTDRHSIKKNLIGALLFDSGETAEATRLKRTARRRYTRRKNRICYLQEIFSNEMAKVDDSFFHRLEESFLVEEDKKHERHPIFGNIVDEVAYHEKYPTIYHLRKKLVDSTDKADLRLIYLALAHMIKFRGHFLIEGDLNPDNSDVDKLFIQLVQTYNQLFEENPINASGVDAKAILSARLSKSRRLENLIAQLPGEKKNGLFGNLIALSLGLTPNFKSNFDLAEDAKLQLSKDTYDDDLDNLLAQIGDQYADLFLAAKNLSDAILLSDILRVNTEITKAPLSASMIKRYDEHHQDLTLLKALVRQQLPEKYKEIFFDQSKNGYAGYIDGGASQEEFYKFIKPILEKMDGTEELLVKLNREDLLRKQRTFDNGSIPHQIHLGELHAILRRQEDFYPFLKDNREKIEKILTFRIPYYVGPLARGNSRFAWMTRKSEETITPWNFEEVVDKGASAQSFIERMTNFDKNLPNEKVLPKHSLLYEYFTVYNELTKVKYVTEGMRKPAFLSGEQKKAIVDLLFKTNRKVTVKQLKEDYFKKIECFDSVEISGVEDRFNASLGTYHDLLKIIKDKDFLDNEENEDILEDIVLTLTLFEDREMIEERLKTYAHLFDDKVMKQLKRRRYTGWGRLSRKLINGIRDKQSGKTILDFLKSDGFANRNFMQLIHDDSLTFKEDIQKAQVSGQGDSLHEHIANLAGSPAIKKGILQTVKVVDELVKVMGRHKPENIVIEMARENQGSSGSETPGTSESATPESSGSEVEFSHEYWMRHALTLAKRARDEREVPVGAVLVLNNRVIGEGWNRAIGLHDPTAHAEIMALRQGGLVMQNYRLIDATLYVTFEPCVMCAGAMIHSRIGRVVFGVRNAKTGAAGSLMDVLHYPGMNHRVEITEGILADECAALLCYFFRMPRTTQKGQKNSRERMKRIEEGIKELGSQILKEHPVENTQLQNEKLYLYYLQNGRDMYVDQELDINRLSDYDVDHIVPQSFLKDDSIDNKVLTRSDKNRGKSDNVPSEEVVKKMKNYWRQLLNAKLITQRKFDNLTKAERGGLSELDKAGFIKRQLVETRQITKHVAQILDSRMNTKYDENDKLIREVKVITLKSKLVSDFRKDFQFYKVREINNYHHAHDAYLNAVVGTALIKKYPKLESEFVYGDYKVYDVRKMIAKSEQEIGKATAKYFFYSNIMNFFKTEITLANGEIRKRPLIETNGETGEIVWDKGRDFATVRKVLSMPQVNIVKKTEVQTGGFSKESILPKRNSDKLIARKKDWDPKKYGGFDSPTVAYSVLVVAKVEKGKSKKLKSVKELLGITIMERSSFEKNPIDFLEAKGYKEVKKDLIIKLPKYSLFELENGRKRMLASAGELQKGNELALPSKYVNFLYLASHYEKLKGSPEDNEQKQLFVEQHKHYLDEIIEQISEFSKRVILADANLDKVLSAYNKHRDKPIREQAENIIHLFTLTNLGAPAAFKYFDTTIDRKRYTSTKEVLDATLIHQSITGLYETRIDLSQLGGD

SEQ ID NO: 272 - protein, 1540 aa, synthetic construct
  REGION 1..1540: note = 110.1 Cas9 TadAins 1250 polypeptide sequence
MDKKYSIGLAIGTNSVGWAVITDEYKVPSKKFKVLGNTDRHSIKKNLIGALLFDSGETAEATRLKRTARRRYTRRKNRICYLQEIFSNEMAKVDDSFFHRLEESFLVEEDKKHERHPIFGNIVDEVAYHEKYPTIYHLRKKLVDSTDKADLRLIYLALAHMIKFRGHFLIEGDLNPDNSDVDKLFIQLVQTYNQLFEENPINASGVDAKAILSARLSKSRRLENLIAQLPGEKKNGLFGNLIALSLGLTPNFKSNFDLAEDAKLQLSKDTYDDDLDNLLAQIGDQYADLFLAAKNLSDAILLSDILRVNTEITKAPLSASMIKRYDEHHQDLTLLKALVRQQLPEKYKEIFFDQSKNGYAGYIDGGASQEEFYKFIKPILEKMDGTEELLVKLNREDLLRKQRTFDNGSIPHQIHLGELHAILRRQEDFYPFLKDNREKIEKILTFRIPYYVGPLARGNSRFAWMTRKSEETITPWNFEEVVDKGASAQSFIERMTNFDKNLPNEKVLPKHSLLYEYFTVYNELTKVKYVTEGMRKPAFLSGEQKKAIVDLLFKTNRKVTVKQLKEDYFKKIECFDSVEISGVEDRFNASLGTYHDLLKIIKDKDFLDNEENEDILEDIVLTLTLFEDREMIEERLKTYAHLFDDKVMKQLKRRRYTGWGRLSRKLINGIRDKQSGKTILDFLKSDGFANRNFMQLIHDDSLTFKEDIQKAQVSGQGDSLHEHIANLAGSPAIKKGILQTVKVVDELVKVMGRHKPENIVIEMARENQTTQKGQKNSRERMKRIEEGIKELGSQILKEHPVENTQLQNEKLYLYYLQNGRDMYVDQELDINRLSDYDVDHIVPQSFLKDDSIDNKVLTRSDKNRGKSDNVPSEEVVKKMKNYWRQLLNAKLITQRKFDNLTKAERGGLSELDKAGFIKRQLVETRQITKHVAQILDSRMNTKYDENDKLIREVKVITLKSKLVSDFRKDFQFYKVREINNYHHAHDAYLNAVVGTALIKKYPKLESEFVYGDYKVYDVRKMIAKSEQEIGKATAKYFFYSNIMNFFKTEITLANGEIRKRPLIETNGETGEIVWDKGRDFATVRKVLSMPQVNIVKKTEVQTGGFSKESILPKRNSDKLIARKKDWDPKKYGGFDSPTVAYSVLVVAKVEKGKSKKLKSVKELLGITIMERSSFEKNPIDFLEAKGYKEVKKDLIIKLPKYSLFELENGRKRMLASAGELQKGNELALPSKYVNFLYLASHYEKLKGSPGSSGSETPGTSESATPESSGSEVEFSHEYWMRHALTLAKRARDEREVPVGAVLVLNNRVIGEGWNRAIGLHDPTAHAEIMALRQGGLVMQNYRLIDATLYVTFEPCVMCAGAMIHSRIGRVVFGVRNAKTGAAGSLMDVLHYPGMNHRVEITEGILADECAALLCYFFRMPREDNEQKQLFVEQHKHYLDEIIEQISEFSKRVILADANLDKVLSAYNKHRDKPIREQAENIIHLFTLTNLGAPAAFKYFDTTIDRKRYTSTKEVLDATLIHQSITGLYETRIDLSQLGGD

SEQ ID NO: 273 - protein, 1543 aa, synthetic construct
  REGION 1..1543: note = 110.2 Cas9 TadAins 1250 polypeptide sequence
MDKKYSIGLAIGTNSVGWAVITDEYKVPSKKFKVLGNTDRHSIKKNLIGALLFDSGETAEATRLKRTARRRYTRRKNRICYLQEIFSNEMAKVDDSFFHRLEESFLVEEDKKHERHPIFGNIVDEVAYHEKYPTIYHLRKKLVDSTDKADLRLIYLALAHMIKFRGHFLIEGDLNPDNSDVDKLFIQLVQTYNQLFEENPINASGVDAKAILSARLSKSRRLENLIAQLPGEKKNGLFGNLIALSLGLTPNFKSNFDLAEDAKLQLSKDTYDDDLDNLLAQIGDQYADLFLAAKNLSDAILLSDILRVNTEITKAPLSASMIKRYDEHHQDLTLLKALVRQQLPEKYKEIFFDQSKNGYAGYIDGGASQEEFYKFIKPILEKMDGTEELLVKLNREDLLRKQRTFDNGSIPHQIHLGELHAILRRQEDFYPFLKDNREKIEKILTFRIPYYVGPLARGNSRFAWMTRKSEETITPWNFEEVVDKGASAQSFIERMTNFDKNLPNEKVLPKHSLLYEYFTVYNELTKVKYVTEGMRKPAFLSGEQKKAIVDLLFKTNRKVTVKQLKEDYFKKIECFDSVEISGVEDRFNASLGTYHDLLKIIKDKDFLDNEENEDILEDIVLTLTLFEDREMIEERLKTYAHLFDDKVMKQLKRRRYTGWGRLSRKLINGIRDKQSGKTILDFLKSDGFANRNFMQLIHDDSLTFKEDIQKAQVSGQGDSLHEHIANLAGSPAIKKGILQTVKVVDELVKVMGRHKPENIVIEMARENQTTQKGQKNSRERMKRIEEGIKELGSQILKEHPVENTQLQNEKLYLYYLQNGRDMYVDQELDINRLSDYDVDHIVPQSFLKDDSIDNKVLTRSDKNRGKSDNVPSEEVVKKMKNYWRQLLNAKLITQRKFDNLTKAERGGLSELDKAGFIKRQLVETRQITKHVAQILDSRMNTKYDENDKLIREVKVITLKSKLVSDFRKDFQFYKVREINNYHHAHDAYLNAVVGTALIKKYPKLESEFVYGDYKVYDVRKMIAKSEQEIGKATAKYFFYSNIMNFFKTEITLANGEIRKRPLIETNGETGEIVWDKGRDFATVRKVLSMPQVNIVKKTEVQTGGFSKESILPKRNSDKLIARKKDWDPKKYGGFDSPTVAYSVLVVAKVEKGKSKKLKSVKELLGITIMERSSFEKNPIDFLEAKGYKEVKKDLIIKLPKYSLFELENGRKRMLASAGELQKGNELALPSKYVNFLYLASHYEKLKGSPGSSGSSGSETPGTSESATPESSGSEVEFSHEYWMRHALTLAKRARDEREVPVGAVLVLNNRVIGEGWNRAIGLHDPTAHAEIMALRQGGLVMQNYRLIDATLYVTFEPCVMCAGAMIHSRIGRVVFGVRNAKTGAAGSLMDVLHYPGMNHRVEITEGILADECAALLCYFFRMPREDNEQKQLFVEQHKHYLDEIIEQISEFSKRVILADANLDKVLSAYNKHRDKPIREQAENIIHLFTLTNLGAPAAFKYFDTTIDRKRYTSTKEVLDATLIHQSITGLYETRIDLSQLGGD

SEQ ID NO: 274 - protein, 1546 aa, synthetic construct
  REGION 1..1546: note = 110.3 Cas9 TadAins 1250 polypeptide sequence
MDKKYSIGLAIGTNSVGWAVITDEYKVPSKKFKVLGNTDRHSIKKNLIGALLFDSGETAEATRLKRTARRRYTRRKNRICYLQEIFSNEMAKVDDSFFHRLEESFLVEEDKKHERHPIFGNIVDEVAYHEKYPTIYHLRKKLVDSTDKADLRLIYLALAHMIKFRGHFLIEGDLNPDNSDVDKLFIQLVQTYNQLFEENPINASGVDAKAILSARLSKSRRLENLIAQLPGEKKNGLFGNLIALSLGLTPNFKSNFDLAEDAKLQLSKDTYDDDLDNLLAQIGDQYADLFLAAKNLSDAILLSDILRVNTEITKAPLSASMIKRYDEHHQDLTLLKALVRQQLPEKYKEIFFDQSKNGYAGYIDGGASQEEFYKFIKPILEKMDGTEELLVKLNREDLLRKQRTFDNGSIPHQIHLGELHAILRRQEDFYPFLKDNREKIEKILTFRIPYYVGPLARGNSRFAWMTRKSEETITPWNFEEVVDKGASAQSFIERMTNFDKNLPNEKVLPKHSLLYEYFTVYNELTKVKYVTEGMRKPAFLSGEQKKAIVDLLFKTNRKVTVKQLKEDYFKKIECFDSVEISGVEDRFNASLGTYHDLLKIIKDKDFLDNEENEDILEDIVLTLTLFEDREMIEERLKTYAHLFDDKVMKQLKRRRYTGWGRLSRKLINGIRDKQSGKTILDFLKSDGFANRNFMQLIHDDSLTFKEDIQKAQVSGQGDSLHEHIANLAGSPAIKKGILQTVKVVDELVKVMGRHKPENIVIEMARENQTTQKGQKNSRERMKRIEEGIKELGSQILKEHPVENTQLQNEKLYLYYLQNGRDMYVDQELDINRLSDYDVDHIVPQSFLKDDSIDNKVLTRSDKNRGKSDNVPSEEVVKKMKNYWRQLLNAKLITQRKFDNLTKAERGGLSELDKAGFIKRQLVETRQITKHVAQILDSRMNTKYDENDKLIREVKVITLKSKLVSDFRKDFQFYKVREINNYHHAHDAYLNAVVGTALIKKYPKLESEFVYGDYKVYDVRKMIAKSEQEIGKATAKYFFYSNIMNFFKTEITLANGEIRKRPLIETNGETGEIVWDKGRDFATVRKVLSMPQVNIVKKTEVQTGGFSKESILPKRNSDKLIARKKDWDPKKYGGFDSPTVAYSVLVVAKVEKGKSKKLKSVKELLGITIMERSSFEKNPIDFLEAKGYKEVKKDLIIKLPKYSLFELENGRKRMLASAGELQKGNELALPSKYVNFLYLASHYEKLKGSPGSSGSSGSETPGTSESATPESGSSSGSEVEFSHEYWMRHALTLAKRARDEREVPVGAVLVLNNRVIGEGWNRAIGLHDPTAHAEIMALRQGGLVMQNYRLIDATLYVTFEPCVMCAGAMIHSRIGRVVFGVRNAKTGAAGSLMDVLHYPGMNHRVEITEGILADECAALLCYFFRMPREDNEQKQLFVEQHKHYLDEIIEQISEFSKRVILADANLDKVLSAYNKHRDKPIREQAENIIHLFTLTNLGAPAAFKYFDTTIDRKRYTSTKEVLDATLIHQSITGLYETRIDLSQLGGD

SEQ ID NO: 275 - protein, 1546 aa, synthetic construct
  REGION 1..1546: note = 110.4 Cas9 TadAins 1250 polypeptide sequence
MDKKYSIGLAIGTNSVGWAVITDEYKVPSKKFKVLGNTDRHSIKKNLIGALLFDSGETAEATRLKRTARRRYTRRKNRICYLQEIFSNEMAKVDDSFFHRLEESFLVEEDKKHERHPIFGNIVDEVAYHEKYPTIYHLRKKLVDSTDKADLRLIYLALAHMIKFRGHFLIEGDLNPDNSDVDKLFIQLVQTYNQLFEENPINASGVDAKAILSARLSKSRRLENLIAQLPGEKKNGLFGNLIALSLGLTPNFKSNFDLAEDAKLQLSKDTYDDDLDNLLAQIGDQYADLFLAAKNLSDAILLSDILRVNTEITKAPLSASMIKRYDEHHQDLTLLKALVRQQLPEKYKEIFFDQSKNGYAGYIDGGASQEEFYKFIKPILEKMDGTEELLVKLNREDLLRKQRTFDNGSIPHQIHLGELHAILRRQEDFYPFLKDNREKIEKILTFRIPYYVGPLARGNSRFAWMTRKSEETITPWNFEEVVDKGASAQSFIERMTNFDKNLPNEKVLPKHSLLYEYFTVYNELTKVKYVTEGMRKPAFLSGEQKKAIVDLLFKTNRKVTVKQLKEDYFKKIECFDSVEISGVEDRFNASLGTYHDLLKIIKDKDFLDNEENEDILEDIVLTLTLFEDREMIEERLKTYAHLFDDKVMKQLKRRRYTGWGRLSRKLINGIRDKQSGKTILDFLKSDGFANRNFMQLIHDDSLTFKEDIQKAQVSGQGDSLHEHIANLAGSPAIKKGILQTVKVVDELVKVMGRHKPENIVIEMARENQTTQKGQKNSRERMKRIEEGIKELGSQILKEHPVENTQLQNEKLYLYYLQNGRDMYVDQELDINRLSDYDVDHIVPQSFLKDDSIDNKVLTRSDKNRGKSDNVPSEEVVKKMKNYWRQLLNAKLITQRKFDNLTKAERGGLSELDKAGFIKRQLVETRQITKHVAQILDSRMNTKYDENDKLIREVKVITLKSKLVSDFRKDFQFYKVREINNYHHAHDAYLNAVVGTALIKKYPKLESEFVYGDYKVYDVRKMIAKSEQEIGKATAKYFFYSNIMNFFKTEITLANGEIRKRPLIETNGETGEIVWDKGRDFATVRKVLSMPQVNIVKKTEVQTGGFSKESILPKRNSDKLIARKKDWDPKKYGGFDSPTVAYSVLVVAKVEKGKSKKLKSVKELLGITIMERSSFEKNPIDFLEAKGYKEVKKDLIIKLPKYSLFELENGRKRMLASAGELQKGNELALPSKYVNFLYLASHYEKLKGSPGSSGSSGSETPGTSESATPESGSSSGSEVEFSHEYWMRHALTLAKRARDEREVPVGAVLVLNNRVIGEGWNRAIGLHDPTAHAEIMALRQGGLVMQNYRLIDATLYVTFEPCVMCAGAMIHSRIGRVVFGVRNAKTGAAGSLMDVLHYPGMNHRVEITEGILADECAALLCYFFRMRREDNEQKQLFVEQHKHYLDEIIEQISEFSKRVILADANLDKVLSAYNKHRDKPIREQAENIIHLFTLTNLGAPAAFKYFDTTIDRKRYTSTKEVLDATLIHQSITGLYETRIDLSQLGGD

SEQ ID NO: 276 - protein, 1546 aa, synthetic construct
  REGION 1..1546: note = 110.5 Cas9 TadAins 1249 polypeptide sequence
MDKKYSIGLAIGTNSVGWAVITDEYKVPSKKFKVLGNTDRHSIKKNLIGALLFDSGETAEATRLKRTARRRYTRRKNRICYLQEIFSNEMAKVDDSFFHRLEESFLVEEDKKHERHPIFGNIVDEVAYHEKYPTIYHLRKKLVDSTDKADLRLIYLALAHMIKFRGHFLIEGDLNPDNSDVDKLFIQLVQTYNQLFEENPINASGVDAKAILSARLSKSRRLENLIAQLPGEKKNGLFGNLIALSLGLTPNFKSNFDLAEDAKLQLSKDTYDDDLDNLLAQIGDQYADLFLAAKNLSDAILLSDILRVNTEITKAPLSASMIKRYDEHHQDLTLLKALVRQQLPEKYKEIFFDQSKNGYAGYIDGGASQEEFYKFIKPILEKMDGTEELLVKLNREDLLRKQRTFDNGSIPHQIHLGELHAILRRQEDFYPFLKDNREKIEKILTFRIPYYVGPLARGNSRFAWMTRKSEETITPWNFEEVVDKGASAQSFIERMTNFDKNLPNEKVLPKHSLLYEYFTVYNELTKVKYVTEGMRKPAFLSGEQKKAIVDLLFKTNRKVTVKQLKEDYFKKIECFDSVEISGVEDRFNASLGTYHDLLKIIKDKDFLDNEENEDILEDIVLTLTLFEDREMIEERLKTYAHLFDDKVMKQLKRRRYTGWGRLSRKLINGIRDKQSGKTILDFLKSDGFANRNFMQLIHDDSLTFKEDIQKAQVSGQGDSLHEHIANLAGSPAIKKGILQTVKVVDELVKVMGRHKPENIVIEMARENQTTQKGQKNSRERMKRIEEGIKELGSQILKEHPVENTQLQNEKLYLYYLQNGRDMYVDQELDINRLSDYDVDHIVPQSFLKDDSIDNKVLTRSDKNRGKSDNVPSEEVVKKMKNYWRQLLNAKLITQRKFDNLTKAERGGLSELDKAGFIKRQLVETRQITKHVAQILDSRMNTKYDENDKLIREVKVITLKSKLVSDFRKDFQFYKVREINNYHHAHDAYLNAVVGTALIKKYPKLESEFVYGDYKVYDVRKMIAKSEQEIGKATAKYFFYSNIMNFFKTEITLANGEIRKRPLIETNGETGEIVWDKGRDFATVRKVLSMPQVNIVKKTEVQTGGFSKESILPKRNSDKLIARKKDWDPKKYGGFDSPTVAYSVLVVAKVEKGKSKKLKSVKELLGITIMERSSFEKNPIDFLEAKGYKEVKKDLIIKLPKYSLFELENGRKRMLASAGELQKGNELALPSKYVNFLYLASHYEKLKGSGSSGSSGSETPGTSESATPESGSSSGSEVEFSHEYWMRHALTLAKRARDEREVPVGAVLVLNNRVIGEGWNRAIGLHDPTAHAEIMALRQGGLVMQNYRLIDATLYVTFEPCVMCAGAMIHSRIGRVVFGVRNAKTGAAGSLMDVLHYPGMNHRVEITEGILADECAALLCYFFRMRRPEDNEQKQLFVEQHKHYLDEIIEQISEFSKRVILADANLDKVLSAYNKHRDKPIREQAENIIHLFTLTNLGAPAAFKYFDTTIDRKRYTSTKEVLDATLIHQSITGLYETRIDLSQLGGD

SEQ ID NO: 277 - protein, 1551 aa, synthetic construct
  REGION 1..1551: note = 110.5 Cas9 TadAins delta59-66 1250 polypeptide sequence
MDKKYSIGLAIGTNSVGWAVITDEYKVPSKKFKVLGNTDRHSIKKNLIGALLFDSGETAEATRLKRTARRRYTRRKNRICYLQEIFSNEMAKVDDSFFHRLEESFLVEEDKKHERHPIFGNIVDEVAYHEKYPTIYHLRKKLVDSTDKADLRLIYLALAHMIKFRGHFLIEGDLNPDNSDVDKLFIQLVQTYNQLFEENPINASGVDAKAILSARLSKSRRLENLIAQLPGEKKNGLFGNLIALSLGLTPNFKSNFDLAEDAKLQLSKDTYDDDLDNLLAQIGDQYADLFLAAKNLSDAILLSDILRVNTEITKAPLSASMIKRYDEHHQDLTLLKALVRQQLPEKYKEIFFDQSKNGYAGYIDGGASQEEFYKFIKPILEKMDGTEELLVKLNREDLLRKQRTFDNGSIPHQIHLGELHAILRRQEDFYPFLKDNREKIEKILTFRIPYYVGPLARGNSRFAWMTRKSEETITPWNFEEVVDKGASAQSFIERMTNFDKNLPNEKVLPKHSLLYEYFTVYNELTKVKYVTEGMRKPAFLSGEQKKAIVDLLFKTNRKVTVKQLKEDYFKKIECFDSVEISGVEDRFNASLGTYHDLLKIIKDKDFLDNEENEDILEDIVLTLTLFEDREMIEERLKTYAHLFDDKVMKQLKRRRYTGWGRLSRKLINGIRDKQSGKTILDFLKSDGFANRNFMQLIHDDSLTFKEDIQKAQVSGQGDSLHEHIANLAGSPAIKKGILQTVKVVDELVKVMGRHKPENIVIEMARENQTTQKGQKNSRERMKRIEEGIKELGSQILKEHPVENTQLQNEKLYLYYLQNGRDMYVDQELDINRLSDYDVDHIVPQSFLKDDSIDNKVLTRSDKNRGKSDNVPSEEVVKKMKNYWRQLLNAKLITQRKFDNLTKAERGGLSELDKAGFIKRQLVETRQITKHVAQILDSRMNTKYDENDKLIREVKVITLKSKLVSDFRKDFQFYKVREINNYHHAHDAYLNAVVGTALIKKYPKLESEFVYGDYKVYDVRKMIAKSEQEIGKATAKYFFYSNIMNFFKTEITLANGEIRKRPLIETNGETGEIVWDKGRDFATVRKVLSMPQVNIVKKTEVQTGGFSKESILPKRNSDKLIARKKDWDPKKYGGFDSPTVAYSVLVVAKVEKGKSKKLKSVKELLGITIMERSSFEKNPIDFLEAKGYKEVKKDLIIKLPKYSLFELENGRKRMLASAGELQKGNELALPSKYVNFLYLASHYEKLKGSPGSSGSSGSETPGTSESATPESGSSGSEVEFSHEYWMRHALTLAKRARDEREVPVGAVLVLNNRVIGEGWNRAHAEIMALRQGGLVMQNYRLIDATLYVTFEPCVMCAGAMIHSRIGRVVFGVRNAKTGAAGSLMDVLHYPGMNHRVEITEGILADECAALLCYFFRMPRQVFNAQKKAQSSTDEDNEQKQLFVEQHKHYLDEIIEQISEFSKRVILADANLDKVLSAYNKHRDKPIREQAENIIHLFTLTNLGAPAAFKYFDTTIDRKRYTSTKEVLDATLIHQSITGLYETRIDLSQLGGD

SEQ ID NO: 278 - protein, 1546 aa, synthetic construct
  REGION 1..1546: note = 110.6 Cas9 TadAins 1251 polypeptide sequence
MDKKYSIGLAIGTNSVGWAVITDEYKVPSKKFKVLGNTDRHSIKKNLIGALLFDSGETAEATRLKRTARRRYTRRKNRICYLQEIFSNEMAKVDDSFFHRLEESFLVEEDKKHERHPIFGNIVDEVAYHEKYPTIYHLRKKLVDSTDKADLRLIYLALAHMIKFRGHFLIEGDLNPDNSDVDKLFIQLVQTYNQLFEENPINASGVDAKAILSARLSKSRRLENLIAQLPGEKKNGLFGNLIALSLGLTPNFKSNFDLAEDAKLQLSKDTYDDDLDNLLAQIGDQYADLFLAAKNLSDAILLSDILRVNTEITKAPLSASMIKRYDEHHQDLTLLKALVRQQLPEKYKEIFFDQSKNGYAGYIDGGASQEEFYKFIKPILEKMDGTEELLVKLNREDLLRKQRTFDNGSIPHQIHLGELHAILRRQEDFYPFLKDNREKIEKILTFRIPYYVGPLARGNSRFAWMTRKSEETITPWNFEEVVDKGASAQSFIERMTNFDKNLPNEKVLPKHSLLYEYFTVYNELTKVKYVTEGMRKPAFLSGEQKKAIVDLLFKTNRKVTVKQLKEDYFKKIECFDSVEISGVEDRFNASLGTYHDLLKIIKDKDFLDNEENEDILEDIVLTLTLFEDREMIEERLKTYAHLFDDKVMKQLKRRRYTGWGRLSRKLINGIRDKQSGKTILDFLKSDGFANRNFMQLIHDDSLTFKEDIQKAQVSGQGDSLHEHIANLAGSPAIKKGILQTVKVVDELVKVMGRHKPENIVIEMARENQTTQKGQKNSRERMKRIEEGIKELGSQILKEHPVENTQLQNEKLYLYYLQNGRDMYVDQELDINRLSDYDVDHIVPQSFLKDDSIDNKVLTRSDKNRGKSDNVPSEEVVKKMKNYWRQLLNAKLITQRKFDNLTKAERGGLSELDKAGFIKRQLVETRQITKHVAQILDSRMNTKYDENDKLIREVKVITLKSKLVSDFRKDFQFYKVREINNYHHAHDAYLNAVVGTALIKKYPKLESEFVYGDYKVYDVRKMIAKSEQEIGKATAKYFFYSNIMNFFKTEITLANGEIRKRPLIETNGETGEIVWDKGRDFATVRKVLSMPQVNIVKKTEVQTGGFSKESILPKRNSDKLIARKKDWDPKKYGGFDSPTVAYSVLVVAKVEKGKSKKLKSVKELLGITIMERSSFEKNPIDFLEAKGYKEVKKDLIIKLPKYSLFELENGRKRMLASAGELQKGNELALPSKYVNFLYLASHYEKLKGSPEGSSGSSGSETPGTSESATPESGSSSGSEVEFSHEYWMRHALTLAKRARDEREVPVGAVLVLNNRVIGEGWNRAIGLHDPTAHAEIMALRQGGLVMQNYRLIDATLYVTFEPCVMCAGAMIHSRIGRVVFGVRNAKTGAAGSLMDVLHYPGMNHRVEITEGILADECAALLCYFFRMRRDNEQKQLFVEQHKHYLDEIIEQISEFSKRVILADANLDKVLSAYNKHRDKPIREQAENIIHLFTLTNLGAPAAFKYFDTTIDRKRYTSTKEVLDATLIHQSITGLYETRIDLSQLGGD

SEQ ID NO: 279 - protein, 1546 aa, synthetic construct
  REGION 1..1546: note = 110.7 Cas9 TadAins 1252 polypeptide sequence
MDKKYSIGLAIGTNSVGWAVITDEYKVPSKKFKVLGNTDRHSIKKNLIGALLFDSGETAEATRLKRTARRRYTRRKNRICYLQEIFSNEMAKVDDSFFHRLEESFLVEEDKKHERHPIFGNIVDEVAYHEKYPTIYHLRKKLVDSTDKADLRLIYLALAHMIKFRGHFLIEGDLNPDNSDVDKLFIQLVQTYNQLFEENPINASGVDAKAILSARLSKSRRLENLIAQLPGEKKNGLFGNLIALSLGLTPNFKSNFDLAEDAKLQLSKDTYDDDLDNLLAQIGDQYADLFLAAKNLSDAILLSDILRVNTEITKAPLSASMIKRYDEHHQDLTLLKALVRQQLPEKYKEIFFDQSKNGYAGYIDGGASQEEFYKFIKPILEKMDGTEELLVKLNREDLLRKQRTFDNGSIPHQIHLGELHAILRRQEDFYPFLKDNREKIEKILTFRIPYYVGPLARGNSRFAWMTRKSEETITPWNFEEVVDKGASAQSFIERMTNFDKNLPNEKVLPKHSLLYEYFTVYNELTKVKYVTEGMRKPAFLSGEQKKAIVDLLFKTNRKVTVKQLKEDYFKKIECFDSVEISGVEDRFNASLGTYHDLLKIIKDKDFLDNEENEDILEDIVLTLTLFEDREMIEERLKTYAHLFDDKVMKQLKRRRYTGWGRLSRKLINGIRDKQSGKTILDFLKSDGFANRNFMQLIHDDSLTFKEDIQKAQVSGQGDSLHEHIANLAGSPAIKKGILQTVKVVDELVKVMGRHKPENIVIEMARENQTTQKGQKNSRERMKRIEEGIKELGSQILKEHPVENTQLQNEKLYLYYLQNGRDMYVDQELDINRLSDYDVDHIVPQSFLKDDSIDNKVLTRSDKNRGKSDNVPSEEVVKKMKNYWRQLLNAKLITQRKFDNLTKAERGGLSELDKAGFIKRQLVETRQITKHVAQILDSRMNTKYDENDKLIREVKVITLKSKLVSDFRKDFQFYKVREINNYHHAHDAYLNAVVGTALIKKYPKLESEFVYGDYKVYDVRKMIAKSEQEIGKATAKYFFYSNIMNFFKTEITLANGEIRKRPLIETNGETGEIVWDKGRDFATVRKVLSMPQVNIVKKTEVQTGGFSKESILPKRNSDKLIARKKDWDPKKYGGFDSPTVAYSVLVVAKVEKGKSKKLKSVKELLGITIMERSSFEKNPIDFLEAKGYKEVKKDLIIKLPKYSLFELENGRKRMLASAGELQKGNELALPSKYVNFLYLASHYEKLKGSPEDGSSGSSGSETPGTSESATPESGSSSGSEVEFSHEYWMRHALTLAKRARDEREVPVGAVLVLNNRVIGEGWNRAIGLHDPTAHAEIMALRQGGLVMQNYRLIDATLYVTFEPCVMCAGAMIHSRIGRVVFGVRNAKTGAAGSLMDVLHYPGMNHRVEITEGILADECAALLCYFFRMRRNEQKQLFVEQHKHYLDEIIEQISEFSKRVILADANLDKVLSAYNKHRDKPIREQAENIIHLFTLTNLGAPAAFKYFDTTIDRKRYTSTKEVLDATLIHQSITGLYETRIDLSQLGGD

SEQ ID NO: 280 - protein, 1533 aa, synthetic construct
  REGION 1..1533: note = 110.8 Cas9 TadAins delta59-66 C-truncate 1250 polypeptide sequence
MDKKYSIGLAIGTNSVGWAVITDEYKVPSKKFKVLGNTDRHSIKKNLIGALLFDSGETAEATRLKRTARRRYTRRKNRICYLQEIFSNEMAKVDDSFFHRLEESFLVEEDKKHERHPIFGNIVDEVAYHEKYPTIYHLRKKLVDSTDKADLRLIYLALAHMIKFRGHFLIEGDLNPDNSDVDKLFIQLVQTYNQLFEENPINASGVDAKAILSARLSKSRRLENLIAQLPGEKKNGLFGNLIALSLGLTPNFKSNFDLAEDAKLQLSKDTYDDDLDNLLAQIGDQYADLFLAAKNLSDAILLSDILRVNTEITKAPLSASMIKRYDEHHQDLTLLKALVRQQLPEKYKEIFFDQSKNGYAGYIDGGASQEEFYKFIKPILEKMDGTEELLVKLNREDLLRKQRTFDNGSIPHQIHLGELHAILRRQEDFYPFLKDNREKIEKILTFRIPYYVGPLARGNSRFAWMTRKSEETITPWNFEEVVDKGASAQSFIERMTNFDKNLPNEKVLPKHSLLYEYFTVYNELTKVKYVTEGMRKPAFLSGEQKKAIVDLLFKTNRKVTVKQLKEDYFKKIECFDSVEISGVEDRFNASLGTYHDLLKIIKDKDFLDNEENEDILEDIVLTLTLFEDREMIEERLKTYAHLFDDKVMKQLKRRRYTGWGRLSRKLINGIRDKQSGKTILDFLKSDGFANRNFMQLIHDDSLTFKEDIQKAQVSGQGDSLHEHIANLAGSPAIKKGILQTVKVVDELVKVMGRHKPENIVIEMARENQTTQKGQKNSRERMKRIEEGIKELGSQILKEHPVENTQLQNEKLYLYYLQNGRDMYVDQELDINRLSDYDVDHIVPQSFLKDDSIDNKVLTRSDKNRGKSDNVPSEEVVKKMKNYWRQLLNAKLITQRKFDNLTKAERGGLSELDKAGFIKRQLVETRQITKHVAQILDSRMNTKYDENDKLIREVKVITLKSKLVSDFRKDFQFYKVREINNYHHAHDAYLNAVVGTALIKKYPKLESEFVYGDYKVYDVRKMIAKSEQEIGKATAKYFFYSNIMNFFKTEITLANGEIRKRPLIETNGETGEIVWDKGRDFATVRKVLSMPQVNIVKKTEVQTGGFSKESILPKRNSDKLIARKKDWDPKKYGGFDSPTVAYSVLVVAKVEKGKSKKLKSVKELLGITIMERSSFEKNPIDFLEAKGYKEVKKDLIIKLPKYSLFELENGRKRMLASAGELQKGNELALPSKYVNFLYLASHYEKLKGSPGSSGSETPGTSESATPESSGSEVEFSHEYWMRHALTLAKRARDEREVPVGAVLVLNNRVIGEGWNRAHAEIMALRQGGLVMQNYRLIDATLYVTFEPCVMCAGAMIHSRIGRVVFGVRNAKTGAAGSLMDVLHYPGMNHRVEITEGILADECAALLCYFFRMPRQEDNEQKQLFVEQHKHYLDEIIEQISEFSKRVILADANLDKVLSAYNKHRDKPIREQAENIIHLFTLTNLGAPAAFKYFDTTIDRKRYTSTKEVLDATLIHQSITGLYETRIDLSQLGGD

SEQ ID NO: 281 - protein, 1549 aa, synthetic construct
  REGION 1..1549: note = 111.1 Cas9 TadAins 997 polypeptide sequence
MDKKYSIGLAIGTNSVGWAVITDEYKVPSKKFKVLGNTDRHSIKKNLIGALLFDSGETAEATRLKRTARRRYTRRKNRICYLQEIFSNEMAKVDDSFFHRLEESFLVEEDKKHERHPIFGNIVDEVAYHEKYPTIYHLRKKLVDSTDKADLRLIYLALAHMIKFRGHFLIEGDLNPDNSDVDKLFIQLVQTYNQLFEENPINASGVDAKAILSARLSKSRRLENLIAQLPGEKKNGLFGNLIALSLGLTPNFKSNFDLAEDAKLQLSKDTYDDDLDNLLAQIGDQYADLFLAAKNLSDAILLSDILRVNTEITKAPLSASMIKRYDEHHQDLTLLKALVRQQLPEKYKEIFFDQSKNGYAGYIDGGASQEEFYKFIKPILEKMDGTEELLVKLNREDLLRKQRTFDNGSIPHQIHLGELHAILRRQEDFYPFLKDNREKIEKILTFRIPYYVGPLARGNSRFAWMTRKSEETITPWNFEEVVDKGASAQSFIERMTNFDKNLPNEKVLPKHSLLYEYFTVYNELTKVKYVTEGMRKPAFLSGEQKKAIVDLLFKTNRKVTVKQLKEDYFKKIECFDSVEISGVEDRFNASLGTYHDLLKIIKDKDFLDNEENEDILEDIVLTLTLFEDREMIEERLKTYAHLFDDKVMKQLKRRRYTGWGRLSRKLINGIRDKQSGKTILDFLKSDGFANRNFMQLIHDDSLTFKEDIQKAQVSGQGDSLHEHIANLAGSPAIKKGILQTVKVVDELVKVMGRHKPENIVIEMARENQTTQKGQKNSRERMKRIEEGIKELGSQILKEHPVENTQLQNEKLYLYYLQNGRDMYVDQELDINRLSDYDVDHIVPQSFLKDDSIDNKVLTRSDKNRGKSDNVPSEEVVKKMKNYWRQLLNAKLITQRKFDNLTKAERGGLSELDKAGFIKRQLVETRQITKHVAQILDSRMNTKYDENDKLIREVKVITLKSKLVSDFRKDFQFYKVREINNYHHAHDAYLNAVVGTALSHEYWMRHALTLAKRARDEREVPVGAVLVLNNRVIGEGWNRAIGLHDPTAHAEIMALRQGGLVMQNYRLIDATLYVTFEPCVMCAGAMIHSRIGRVVFGVRNAKTGAAGSLMDVLHYPGMNHRVEITEGILADECAALLCYFFRMPRQVFNAQKKAQSSTDGSSGSETPGTSESATPESSGIKKYPKLESEFVYGDYKVYDVRKMIAKSEQEIGKATAKYFFYSNIMNFFKTEITLANGEIRKRPLIETNGETGEIVWDKGRDFATVRKVLSMPQVNIVKKTEVQTGGFSKESILPKRNSDKLIARKKDWDPKKYGGFDSPTVAYSVLVVAKVEKGKSKKLKSVKELLGITIMERSSFEKNPIDFLEAKGYKEVKKDLIIKLPKYSLFELENGRKRMLASAGELQKGNELALPSKYVNFLYLASHYEKLKGSPEDNEQKQLFVEQHKHYLDEIIEQISEFSKRVILADANLDKVLSAYNKHRDKPIREQAENIIHLFTLTNLGAPAAFKYFDTTIDRKRYTSTKEVLDATLIHQSITGLYETRIDLSQLGGD

SEQ ID NO: 282 - protein, 1555 aa, synthetic construct
  REGION 1..1555: note = 111.2 Cas9 TadAins 997 polypeptide sequence
MDKKYSIGLAIGTNSVGWAVITDEYKVPSKKFKVLGNTDRHSIKKNLIGALLFDSGETAEATRLKRTARRRYTRRKNRICYLQEIFSNEMAKVDDSFFHRLEESFLVEEDKKHERHPIFGNIVDEVAYHEKYPTIYHLRKKLVDSTDKADLRLIYLALAHMIKFRGHFLIEGDLNPDNSDVDKLFIQLVQTYNQLFEENPINASGVDAKAILSARLSKSRRLENLIAQLPGEKKNGLFGNLIALSLGLTPNFKSNFDLAEDAKLQLSKDTYDDDLDNLLAQIGDQYADLFLAAKNLSDAILLSDILRVNTEITKAPLSASMIKRYDEHHQDLTLLKALVRQQLPEKYKEIFFDQSKNGYAGYIDGGASQEEFYKFIKPILEKMDGTEELLVKLNREDLLRKQRTFDNGSIPHQIHLGELHAILRRQEDFYPFLKDNREKIEKILTFRIPYYVGPLARGNSRFAWMTRKSEETITPWNFEEVVDKGASAQSFIERMTNFDKNLPNEKVLPKHSLLYEYFTVYNELTKVKYVTEGMRKPAFLSGEQKKAIVDLLFKTNRKVTVKQLKEDYFKKIECFDSVEISGVEDRFNASLGTYHDLLKIIKDKDFLDNEENEDILEDIVLTLTLFEDREMIEERLKTYAHLFDDKVMKQLKRRRYTGWGRLSRKLINGIRDKQSGKTILDFLKSDGFANRNFMQLIHDDSLTFKEDIQKAQVSGQGDSLHEHIANLAGSPAIKKGILQTVKVVDELVKVMGRHKPENIVIEMARENQTTQKGQKNSRERMKRIEEGIKELGSQILKEHPVENTQLQNEKLYLYYLQNGRDMYVDQELDINRLSDYDVDHIVPQSFLKDDSIDNKVLTRSDKNRGKSDNVPSEEVVKKMKNYWRQLLNAKLITQRKFDNLTKAERGGLSELDKAGFIKRQLVETRQITKHVAQILDSRMNTKYDENDKLIREVKVITLKSKLVSDFRKDFQFYKVREINNYHHAHDAYLNAVVGTALSHEYWMRHALTLAKRARDEREVPVGAVLVLNNRVIGEGWNRAIGLHDPTAHAEIMALRQGGLVMQNYRLIDATLYVTFEPCVMCAGAMIHSRIGRVVFGVRNAKTGAAGSLMDVLHYPGMNHRVEITEGILADECAALLCYFFRMPRQVFNAQKKAQSSTDGSSGSSGSETPGTSESATPESSGGSSIKKYPKLESEFVYGDYKVYDVRKMIAKSEQEIGKATAKYFFYSNIMNFFKTEITLANGEIRKRPLIETNGETGEIVWDKGRDFATVRKVLSMPQVNIVKKTEVQTGGFSKESILPKRNSDKLIARKKDWDPKKYGGFDSPTVAYSVLVVAKVEKGKSKKLKSVKELLGITIMERSSFEKNPIDFLEAKGYKEVKKDLIIKLPKYSLFELENGRKRMLASAGELQKGNELALPSKYVNFLYLASHYEKLKGSPEDNEQKQLFVEQHKHYLDEIIEQISEFSKRVILADANLDKVLSAYNKHRDKPIREQAENIIHLFTLTNLGAPAAFKYFDTTIDRKRYTSTKEVLDATLIHQSITGLYETRIDLSQLGGD

SEQ ID NO: 283 - protein, 1421 aa, synthetic construct
  REGION 1..1421: note = 112 delta HNH TadA polypeptide sequence
MDKKYSIGLAIGTNSVGWAVITDEYKVPSKKFKVLGNTDRHSIKKNLIGALLFDSGETAEATRLKRTARRRYTRRKNRICYLQEIFSNEMAKVDDSFFHRLEESFLVEEDKKHERHPIFGNIVDEVAYHEKYPTIYHLRKKLVDSTDKADLRLIYLALAHMIKFRGHFLIEGDLNPDNSDVDKLFIQLVQTYNQLFEENPINASGVDAKAILSARLSKSRRLENLIAQLPGEKKNGLFGNLIALSLGLTPNFKSNFDLAEDAKLQLSKDTYDDDLDNLLAQIGDQYADLFLAAKNLSDAILLSDILRVNTEITKAPLSASMIKRYDEHHQDLTLLKALVRQQLPEKYKEIFFDQSKNGYAGYIDGGASQEEFYKFIKPILEKMDGTEELLVKLNREDLLRKQRTFDNGSIPHQIHLGELHAILRRQEDFYPFLKDNREKIEKILTFRIPYYVGPLARGNSRFAWMTRKSEETITPWNFEEVVDKGASAQSFIERMTNFDKNLPNEKVLPKHSLLYEYFTVYNELTKVKYVTEGMRKPAFLSGEQKKAIVDLLFKTNRKVTVKQLKEDYFKKIECFDSVEISGVEDRFNASLGTYHDLLKIIKDKDFLDNEENEDILEDIVLTLTLFEDREMIEERLKTYAHLFDDKVMKQLKRRRYTGWGRLSRKLINGIRDKQSGKTILDFLKSDGFANRNFMQLIHDDSLTFKEDIQKAQVSGQGDSLHEHIANLAGSPAIKKGILQTVKVVDELVKVMGRHKPENIVIEMARENQTTQKGQKNSRERMKRIEEGIKELGSEVEFSHEYWMRHALTLAKRARDEREVPVGAVLVLNNRVIGEGWNRAIGLHDPTAHAEIMALRQGGLVMQNYRLIDATLYVTFEPCVMCAGAMIHSRIGRVVFGVRNAKTGAAGSLMDVLHYPGMNHRVEITEGILADECAALLCYFFRMPRQVFNAQKKAQSSTDGGLSELDKAGFIKRQLVETRQITKHVAQILDSRMNTKYDENDKLIREVKVITLKSKLVSDFRKDFQFYKVREINNYHHAHDAYLNAVVGTALIKKYPKLESEFVYGDYKVYDVRKMIAKSEQEIGKATAKYFFYSNIMNFFKTEITLANGEIRKRPLIETNGETGEIVWDKGRDFATVRKVLSMPQVNIVKKTEVQTGGFSKESILPKRNSDKLIARKKDWDPKKYGGFDSPTVAYSVLVVAKVEKGKSKKLKSVKELLGITIMERSSFEKNPIDFLEAKGYKEVKKDLIIKLPKYSLFELENGRKRMLASAGELQKGNELALPSKYVNFLYLASHYEKLKGSPEDNEQKQLFVEQHKHYLDEIIEQISEFSKRVILADANLDKVLSAYNKHRDKPIREQAENIIHLFTLTNLGAPAAFKYFDTTIDRKRYTSTKEVLDATLIHQSITGLYETRIDLSQLGGD

SEQ ID NO: 284 - protein, 1552 aa, synthetic construct
  REGION 1..1552: note = 113 N-term single TadA helixtrunc 165-end polypeptide sequence
MSEVEFSHEYWMRHALTLAKRARDEREVPVGAVLVLNNRVIGEGWNRAIGLHDPTAHAEIMALRQGGLVMQNYRLIDATLYVTFEPCVMCAGAMIHSRIGRVVFGVRNAKTGAAGSLMDVLHYPGMNHRVEITEGILADECAALLCYFFRMPRSGGSSGGSSGSETPGTSESATPESSGGSSGGSDKKYSIGLAIGTNSVGWAVITDEYKVPSKKFKVLGNTDRHSIKKNLIGALLFDSGETAEATRLKRTARRRYTRRKNRICYLQEIFSNEMAKVDDSFFHRLEESFLVEEDKKHERHPIFGNIVDEVAYHEKYPTIYHLRKKLVDSTDKADLRLIYLALAHMIKFRGHFLIEGDLNPDNSDVDKLFIQLVQTYNQLFEENPINASGVDAKAILSARLSKSRRLENLIAQLPGEKKNGLFGNLIALSLGLTPNFKSNFDLAEDAKLQLSKDTYDDDLDNLLAQIGDQYADLFLAAKNLSDAILLSDILRVNTEITKAPLSASMIKRYDEHHQDLTLLKALVRQQLPEKYKEIFFDQSKNGYAGYIDGGASQEEFYKFIKPILEKMDGTEELLVKLNREDLLRKQRTFDNGSIPHQIHLGELHAILRRQEDFYPFLKDNREKIEKILTFRIPYYVGPLARGNSRFAWMTRKSEETITPWNFEEVVDKGASAQSFIERMTNFDKNLPNEKVLPKHSLLYEYFTVYNELTKVKYVTEGMRKPAFLSGEQKKAIVDLLFKTNRKVTVKQLKEDYFKKIECFDSVEISGVEDRFNASLGTYHDLLKIIKDKDFLDNEENEDILEDIVLTLTLFEDREMIEERLKTYAHLFDDKVMKQLKRRRYTGWGRLSRKLINGIRDKQSGKTILDFLKSDGFANRNFMQLIHDDSLTFKEDIQKAQVSGQGDSLHEHIANLAGSPAIKKGILQTVKVVDELVKVMGRHKPENIVIEMARENQTTQKGQKNSRERMKRIEEGIKELGSQILKEHPVENTQLQNEKLYLYYLQNGRDMYVDQELDINRLSDYDVDHIVPQSFLKDDSIDNKVLTRSDKNRGKSDNVPSEEVVKKMKNYWRQLLNAKLITQRKFDNLTKAERGGLSELDKAGFIKRQLVETRQITKHVAQILDSRMNTKYDENDKLIREVKVITLKSKLVSDFRKDFQFYKVREINNYHHAHDAYLNAVVGTALIKKYPKLESEFVYGDYKVYDVRKMIAKSEQEIGKATAKYFFYSNIMNFFKTEITLANGEIRKRPLIETNGETGEIVWDKGRDFATVRKVLSMPQVNIVKKTEVQTGGFSKESILPKRNSDKLIARKKDWDPKKYGGFDSPTVAYSVLVVAKVEKGKSKKLKSVKELLGITIMERSSFEKNPIDFLEAKGYKEVKKDLIIKLPKYSLFELENGRKRMLASAGELQKGNELALPSKYVNFLYLASHYEKLKGSPEDNEQKQLFVEQHKHYLDEIIEQISEFSKRVILADANLDKVLSAYNKHRDKPIREQAENIIHLFTLTNLGAPAAFKYFDTTIDRKRYTSTKEVLDATLIHQSITGLYETRIDLSQLGGD

SEQ ID NO: 285 - protein, 1545 aa, synthetic construct
  REGION 1..1545: note = 114 N-term single TadA helixtrunc 165-end delta 59-65 polypeptide sequence
MSEVEFSHEYWMRHALTLAKRARDEREVPVGAVLVLNNRVIGEGWNRTAHAEIMALRQGGLVMQNYRLIDATLYVTFEPCVMCAGAMIHSRIGRVVFGVRNAKTGAAGSLMDVLHYPGMNHRVEITEGILADECAALLCYFFRMPRSGGSSGGSSGSETPGTSESATPESSGGSSGGSDKKYSIGLAIGTNSVGWAVITDEYKVPSKKFKVLGNTDRHSIKKNLIGALLFDSGETAEATRLKRTARRRYTRRKNRICYLQEIFSNEMAKVDDSFFHRLEESFLVEEDKKHERHPIFGNIVDEVAYHEKYPTIYHLRKKLVDSTDKADLRLIYLALAHMIKFRGHFLIEGDLNPDNSDVDKLFIQLVQTYNQLFEENPINASGVDAKAILSARLSKSRRLENLIAQLPGEKKNGLFGNLIALSLGLTPNFKSNFDLAEDAKLQLSKDTYDDDLDNLLAQIGDQYADLFLAAKNLSDAILLSDILRVNTEITKAPLSASMIKRYDEHHQDLTLLKALVRQQLPEKYKEIFFDQSKNGYAGYIDGGASQEEFYKFIKPILEKMDGTEELLVKLNREDLLRKQRTFDNGSIPHQIHLGELHAILRRQEDFYPFLKDNREKIEKILTFRIPYYVGPLARGNSRFAWMTRKSEETITPWNFEEVVDKGASAQSFIERMTNFDKNLPNEKVLPKHSLLYEYFTVYNELTKVKYVTEGMRKPAFLSGEQKKAIVDLLFKTNRKVTVKQLKEDYFKKIECFDSVEISGVEDRFNASLGTYHDLLKIIKDKDFLDNEENEDILEDIVLTLTLFEDREMIEERLKTYAHLFDDKVMKQLKRRRYTGWGRLSRKLINGIRDKQSGKTILDFLKSDGFANRNFMQLIHDDSLTFKEDIQKAQVSGQGDSLHEHIANLAGSPAIKKGILQTVKVVDELVKVMGRHKPENIVIEMARENQTTQKGQKNSRERMKRIEEGIKELGSQILKEHPVENTQLQNEKLYLYYLQNGRDMYVDQELDINRLSDYDVDHIVPQSFLKDDSIDNKVLTRSDKNRGKSDNVPSEEVVKKMKNYWRQLLNAKLITQRKFDNLTKAERGGLSELDKAGFIKRQLVETRQITKHVAQILDSRMNTKYDENDKLIREVKVITLKSKLVSDFRKDFQFYKVREINNYHHAHDAYLNAVVGTALIKKYPKLESEFVYGDYKVYDVRKMIAKSEQEIGKATAKYFFYSNIMNFFKTEITLANGEIRKRPLIETNGETGEIVWDKGRDFATVRKVLSMPQVNIVKKTEVQTGGFSKESILPKRNSDKLIARKKDWDPKKYGGFDSPTVAYSVLVVAKVEKGKSKKLKSVKELLGITIMERSSFEKNPIDFLEAKGYKEVKKDLIIKLPKYSLFELENGRKRMLASAGELQKGNELALPSKYVNFLYLASHYEKLKGSPEDNEQKQLFVEQHKHYLDEIIEQISEFSKRVILADANLDKVLSAYNKHRDKPIREQAENIIHLFTLTNLGAPAAFKYFDTTIDRKRYTSTKEVLDATLIHQSITGLYETRIDLSQLGGD

SEQ ID NO: 286 - protein, 1541 aa, synthetic construct
  REGION 1..1541: note = 115.1 Cas9 TadAins 1004 polypeptide sequence
MDKKYSIGLAIGTNSVGWAVITDEYKVPSKKFKVLGNTDRHSIKKNLIGALLFDSGETAEATRLKRTARRRYTRRKNRICYLQEIFSNEMAKVDDSFFHRLEESFLVEEDKKHERHPIFGNIVDEVAYHEKYPTIYHLRKKLVDSTDKADLRLIYLALAHMIKFRGHFLIEGDLNPDNSDVDKLFIQLVQTYNQLFEENPINASGVDAKAILSARLSKSRRLENLIAQLPGEKKNGLFGNLIALSLGLTPNFKSNFDLAEDAKLQLSKDTYDDDLDNLLAQIGDQYADLFLAAKNLSDAILLSDILRVNTEITKAPLSASMIKRYDEHHQDLTLLKALVRQQLPEKYKEIFFDQSKNGYAGYIDGGASQEEFYKFIKPILEKMDGTEELLVKLNREDLLRKQRTFDNGSIPHQIHLGELHAILRRQEDFYPFLKDNREKIEKILTFRIPYYVGPLARGNSRFAWMTRKSEETITPWNFEEVVDKGASAQSFIERMTNFDKNLPNEKVLPKHSLLYEYFTVYNELTKVKYVTEGMRKPAFLSGEQKKAIVDLLFKTNRKVTVKQLKEDYFKKIECFDSVEISGVEDRFNASLGTYHDLLKIIKDKDFLDNEENEDILEDIVLTLTLFEDREMIEERLKTYAHLFDDKVMKQLKRRRYTGWGRLSRKLINGIRDKQSGKTILDFLKSDGFANRNFMQLIHDDSLTFKEDIQKAQVSGQGDSLHEHIANLAGSPAIKKGILQTVKVVDELVKVMGRHKPENIVIEMARENQTTQKGQKNSRERMKRIEEGIKELGSQILKEHPVENTQLQNEKLYLYYLQNGRDMYVDQELDINRLSDYDVDHIVPQSFLKDDSIDNKVLTRSDKNRGKSDNVPSEEVVKKMKNYWRQLLNAKLITQRKFDNLTKAERGGLSELDKAGFIKRQLVETRQITKHVAQILDSRMNTKYDENDKLIREVKVITLKSKLVSDFRKDFQFYKVREINNYHHAHDAYLNAVVGTALIKKYPKGSSGSETPGTSESATPESSGSEVEFSHEYWMRHALTLAKRARDEREVPVGAVLVLNNRVIGEGWNRAIGLHDPTAHAEIMALRQGGLVMQNYRLIDATLYVTFEPCVMCAGAMIHSRIGRVVFGVRNAKTGAAGSLMDVLHYPGMNHRVEITEGILADECAALLCYFFRMPRQLESEFVYGDYKVYDVRKMIAKSEQEIGKATAKYFFYSNIMNFFKTEITLANGEIRKRPLIETNGETGEIVWDKGRDFATVRKVLSMPQVNIVKKTEVQTGGFSKESILPKRNSDKLIARKKDWDPKKYGGFDSPTVAYSVLVVAKVEKGKSKKLKSVKELLGITIMERSSFEKNPIDFLEAKGYKEVKKDLIIKLPKYSLFELENGRKRMLASAGELQKGNELALPSKYVNFLYLASHYEKLKGSPEDNEQKQLFVEQHKHYLDEIIEQISEFSKRVILADANLDKVLSAYNKHRDKPIREQAENIIHLFTLTNLGAPAAFKYFDTTIDRKRYTSTKEVLDATLIHQSITGLYETRIDLSQLGGD

SEQ ID NO: 287 - protein, 1541 aa, synthetic construct
  REGION 1..1541: note = 115.2 Cas9 TadAins 1005 polypeptide sequence
MDKKYSIGLAIGTNSVGWAVITDEYKVPSKKFKVLGNTDRHSIKKNLIGALLFDSGETAEATRLKRTARRRYTRRKNRICYLQEIFSNEMAKVDDSFFHRLEESFLVEEDKKHERHPIFGNIVDEVAYHEKYPTIYHLRKKLVDSTDKADLRLIYLALAHMIKFRGHFLIEGDLNPDNSDVDKLFIQLVQTYNQLFEENPINASGVDAKAILSARLSKSRRLENLIAQLPGEKKNGLFGNLIALSLGLTPNFKSNFDLAEDAKLQLSKDTYDDDLDNLLAQIGDQYADLFLAAKNLSDAILLSDILRVNTEITKAPLSASMIKRYDEHHQDLTLLKALVRQQLPEKYKEIFFDQSKNGYAGYIDGGASQEEFYKFIKPILEKMDGTEELLVKLNREDLLRKQRTFDNGSIPHQIHLGELHAILRRQEDFYPFLKDNREKIEKILTFRIPYYVGPLARGNSRFAWMTRKSEETITPWNFEEVVDKGASAQSFIERMTNFDKNLPNEKVLPKHSLLYEYFTVYNELTKVKYVTEGMRKPAFLSGEQKKAIVDLLFKTNRKVTVKQLKEDYFKKIECFDSVEISGVEDRFNASLGTYHDLLKIIKDKDFLDNEENEDILEDIVLTLTLFEDREMIEERLKTYAHLFDDKVMKQLKRRRYTGWGRLSRKLINGIRDKQSGKTILDFLKSDGFANRNFMQLIHDDSLTFKEDIQKAQVSGQGDSLHEHIANLAGSPAIKKGILQTVKVVDELVKVMGRHKPENIVIEMARENQTTQKGQKNSRERMKRIEEGIKELGSQILKEHPVENTQLQNEKLYLYYLQNGRDMYVDQELDINRLSDYDVDHIVPQSFLKDDSIDNKVLTRSDKNRGKSDNVPSEEVVKKMKNYWRQLLNAKLITQRKFDNLTKAERGGLSELDKAGFIKRQLVETRQITKHVAQILDSRMNTKYDENDKLIREVKVITLKSKLVSDFRKDFQFYKVREINNYHHAHDAYLNAVVGTALIKKYPKLGSSGSETPGTSESATPESSGSEVEFSHEYWMRHALTLAKRARDEREVPVGAVLVLNNRVIGEGWNRAIGLHDPTAHAEIMALRQGGLVMQNYRLIDATLYVTFEPCVMCAGAMIHSRIGRVVFGVRNAKTGAAGSLMDVLHYPGMNHRVEITEGILADECAALLCYFFRMPRQESEFVYGDYKVYDVRKMIAKSEQEIGKATAKYFFYSNIMNFFKTEITLANGEIRKRPLIETNGETGEIVWDKGRDFATVRKVLSMPQVNIVKKTEVQTGGFSKESILPKRNSDKLIARKKDWDPKKYGGFDSPTVAYSVLVVAKVEKGKSKKLKSVKELLGITIMERSSFEKNPIDFLEAKGYKEVKKDLIIKLPKYSLFELENGRKRMLASAGELQKGNELALPSKYVNFLYLASHYEKLKGSPEDNEQKQLFVEQHKHYLDEIIEQISEFSKRVILADANLDKVLSAYNKHRDKPIREQAENIIHLFTLTNLGAPAAFKYFDTTIDRKRYTSTKEVLDATLIHQSITGLYETRIDLSQLGGD

SEQ ID NO: 288 - protein, 1541 aa, synthetic construct
  REGION 1..1541: note = 115.3 Cas9 TadAins 1006 polypeptide sequence
MDKKYSIGLAIGTNSVGWAVITDEYKVPSKKFKVLGNTDRHSIKKNLIGALLFDSGETAEATRLKRTARRRYTRRKNRICYLQEIFSNEMAKVDDSFFHRLEESFLVEEDKKHERHPIFGNIVDEVAYHEKYPTIYHLRKKLVDSTDKADLRLIYLALAHMIKFRGHFLIEGDLNPDNSDVDKLFIQLVQTYNQLFEENPINASGVDAKAILSARLSKSRRLENLIAQLPGEKKNGLFGNLIALSLGLTPNFKSNFDLAEDAKLQLSKDTYDDDLDNLLAQIGDQYADLFLAAKNLSDAILLSDILRVNTEITKAPLSASMIKRYDEHHQDLTLLKALVRQQLPEKYKEIFFDQSKNGYAGYIDGGASQEEFYKFIKPILEKMDGTEELLVKLNREDLLRKQRTFDNGSIPHQIHLGELHAILRRQEDFYPFLKDNREKIEKILTFRIPYYVGPLARGNSRFAWMTRKSEETITPWNFEEVVDKGASAQSFIERMTNFDKNLPNEKVLPKHSLLYEYFTVYNELTKVKYVTEGMRKPAFLSGEQKKAIVDLLFKTNRKVTVKQLKEDYFKKIECFDSVEISGVEDRFNASLGTYHDLLKIIKDKDFLDNEENEDILEDIVLTLTLFEDREMIEERLKTYAHLFDDKVMKQLKRRRYTGWGRLSRKLINGIRDKQSGKTILDFLKSDGFANRNFMQLIHDDSLTFKEDIQKAQVSGQGDSLHEHIANLAGSPAIKKGILQTVKVVDELVKVMGRHKPENIVIEMARENQTTQKGQKNSRERMKRIEEGIKELGSQILKEHPVENTQLQNEKLYLYYLQNGRDMYVDQELDINRLSDYDVDHIVPQSFLKDDSIDNKVLTRSDKNRGKSDNVPSEEVVKKMKNYWRQLLNAKLITQRKFDNLTKAERGGLSELDKAGFIKRQLVETRQITKHVAQILDSRMNTKYDENDKLIREVKVITLKSKLVSDFRKDFQFYKVREINNYHHAHDAYLNAVVGTALIKKYPKLEGSSGSETPGTSESATPESSGSEVEFSHEYWMRHALTLAKRARDEREVPVGAVLVLNNRVIGEGWNRAIGLHDPTAHAEIMALRQGGLVMQNYRLIDATLYVTFEPCVMCAGAMIHSRIGRVVFGVRNAKTGAAGSLMDVLHYPGMNHRVEITEGILADECAALLCYFFRMPRQSEFVYGDYKVYDVRKMIAKSEQEIGKATAKYFFYSNIMNFFKTEITLANGEIRKRPLIETNGETGEIVWDKGRDFATVRKVLSMPQVNIVKKTEVQTGGFSKESILPKRNSDKLIARKKDWDPKKYGGFDSPTVAYSVLVVAKVEKGKSKKLKSVKELLGITIMERSSFEKNPIDFLEAKGYKEVKKDLIIKLPKYSLFELENGRKRMLASAGELQKGNELALPSKYVNFLYLASHYEKLKGSPEDNEQKQLFVEQHKHYLDEIIEQISEFSKRVILADANLDKVLSAYNKHRDKPIREQAENIIHLFTLTNLGAPAAFKYFDTTIDRKRYTSTKEVLDATLIHQSITGLYETRIDLSQLGGD

SEQ ID NO: 289 - protein, 1541 aa, synthetic construct
  REGION 1..1541: note = 115.4 Cas9 TadAins 1007 polypeptide sequence
MDKKYSIGLAIGTNSVGWAVITDEYKVPSKKFKVLGNTDRHSIKKNLIGALLFDSGETAEATRLKRTARRRYTRRKNRICYLQEIFSNEMAKVDDSFFHRLEESFLVEEDKKHERHPIFGNIVDEVAYHEKYPTIYHLRKKLVDSTDKADLRLIYLALAHMIKFRGHFLIEGDLNPDNSDVDKLFIQLVQTYNQLFEENPINASGVDAKAILSARLSKSRRLENLIAQLPGEKKNGLFGNLIALSLGLTPNFKSNFDLAEDAKLQLSKDTYDDDLDNLLAQIGDQYADLFLAAKNLSDAILLSDILRVNTEITKAPLSASMIKRYDEHHQDLTLLKALVRQQLPEKYKEIFFDQSKNGYAGYIDGGASQEEFYKFIKPILEKMDGTEELLVKLNREDLLRKQRTFDNGSIPHQIHLGELHAILRRQEDFYPFLKDNREKIEKILTFRIPYYVGPLARGNSRFAWMTRKSEETITPWNFEEVVDKGASAQSFIERMTNFDKNLPNEKVLPKHSLLYEYFTVYNELTKVKYVTEGMRKPAFLSGEQKKAIVDLLFKTNRKVTVKQLKEDYFKKIECFDSVEISGVEDRFNASLGTYHDLLKIIKDKDFLDNEENEDILEDIVLTLTLFEDREMIEERLKTYAHLFDDKVMKQLKRRRYTGWGRLSRKLINGIRDKQSGKTILDFLKSDGFANRNFMQLIHDDSLTFKEDIQKAQVSGQGDSLHEHIANLAGSPAIKKGILQTVKVVDELVKVMGRHKPENIVIEMARENQTTQKGQKNSRERMKRIEEGIKELGSQILKEHPVENTQLQNEKLYLYYLQNGRDMYVDQELDINRLSDYDVDHIVPQSFLKDDSIDNKVLTRSDKNRGKSDNVPSEEVVKKMKNYWRQLLNAKLITQRKFDNLTKAERGGLSELDKAGFIKRQLVETRQITKHVAQILDSRMNTKYDENDKLIREVKVITLKSKLVSDFRKDFQFYKVREINNYHHAHDAYLNAVVGTALIKKYPKLESGSSGSETPGTSESATPESSGSEVEFSHEYWMRHALTLAKRARDEREVPVGAVLVLNNRVIGEGWNRAIGLHDPTAHAEIMALRQGGLVMQNYRLIDATLYVTFEPCVMCAGAMIHSRIGRVVFGVRNAKTGAAGSLMDVLHYPGMNHRVEITEGILADECAALLCYFFRMPRQEFVYGDYKVYDVRKMIAKSEQEIGKATAKYFFYSNIMNFFKTEITLANGEIRKRPLIETNGETGEIVWDKGRDFATVRKVLSMPQVNIVKKTEVQTGGFSKESILPKRNSDKLIARKKDWDPKKYGGFDSPTVAYSVLVVAKVEKGKSKKLKSVKELLGITIMERSSFEKNPIDFLEAKGYKEVKKDLIIKLPKYSLFELENGRKRMLASAGELQKGNELALPSKYVNFLYLASHYEKLKGSPEDNEQKQLFVEQHKHYLDEIIEQISEFSKRVILADANLDKVLSAYNKHRDKPIREQAENIIHLFTLTNLGAPAAFKYFDTTIDRKRYTSTKEVLDATLIHQSITGLYETRIDLSQLGGD

SEQ ID NO: 290 - protein, 1541 aa, synthetic construct
  REGION 1..1541: note = 116.1 Cas9 TadAins C-term truncate 792 polypeptide sequence
MDKKYSIGLAIGTNSVGWAVITDEYKVPSKKFKVLGNTDRHSIKKNLIGALLFDSGETAEATRLKRTARRRYTRRKNRICYLQEIFSNEMAKVDDSFFHRLEESFLVEEDKKHERHPIFGNIVDEVAYHEKYPTIYHLRKKLVDSTDKADLRLIYLALAHMIKFRGHFLIEGDLNPDNSDVDKLFIQLVQTYNQLFEENPINASGVDAKAILSARLSKSRRLENLIAQLPGEKKNGLFGNLIALSLGLTPNFKSNFDLAEDAKLQLSKDTYDDDLDNLLAQIGDQYADLFLAAKNLSDAILLSDILRVNTEITKAPLSASMIKRYDEHHQDLTLLKALVRQQLPEKYKEIFFDQSKNGYAGYIDGGASQEEFYKFIKPILEKMDGTEELLVKLNREDLLRKQRTFDNGSIPHQIHLGELHAILRRQEDFYPFLKDNREKIEKILTFRIPYYVGPLARGNSRFAWMTRKSEETITPWNFEEVVDKGASAQSFIERMTNFDKNLPNEKVLPKHSLLYEYFTVYNELTKVKYVTEGMRKPAFLSGEQKKAIVDLLFKTNRKVTVKQLKEDYFKKIECFDSVEISGVEDRFNASLGTYHDLLKIIKDKDFLDNEENEDILEDIVLTLTLFEDREMIEERLKTYAHLFDDKVMKQLKRRRYTGWGRLSRKLINGIRDKQSGKTILDFLKSDGFANRNFMQLIHDDSLTFKEDIQKAQVSGQGDSLHEHIANLAGSPAIKKGILQTVKVVDELVKVMGRHKPENIVIEMARENQTTQKGQKNSRERMKRIEEGIKELGGSSGSETPGTSESATPESSGSEVEFSHEYWMRHALTLAKRARDEREVPVGAVLVLNNRVIGEGWNRAIGLHDPTAHAEIMALRQGGLVMQNYRLIDATLYVTFEPCVMCAGAMIHSRIGRVVFGVRNAKTGAAGSLMDVLHYPGMNHRVEITEGILADECAALLCYFFRMPRQSQILKEHPVENTQLQNEKLYLYYLQNGRDMYVDQELDINRLSDYDVDHIVPQSFLKDDSIDNKVLTRSDKNRGKSDNVPSEEVVKKMKNYWRQLLNAKLITQRKFDNLTKAERGGLSELDKAGFIKRQLVETRQITKHVAQILDSRMNTKYDENDKLIREVKVITLKSKLVSDFRKDFQFYKVREINNYHHAHDAYLNAVVGTALIKKYPKLESEFVYGDYKVYDVRKMIAKSEQEIGKATAKYFFYSNIMNFFKTEITLANGEIRKRPLIETNGETGEIVWDKGRDFATVRKVLSMPQVNIVKKTEVQTGGFSKESILPKRNSDKLIARKKDWDPKKYGGFDSPTVAYSVLVVAKVEKGKSKKLKSVKELLGITIMERSSFEKNPIDFLEAKGYKEVKKDLIIKLPKYSLFELENGRKRMLASAGELQKGNELALPSKYVNFLYLASHYEKLKGSPEDNEQKQLFVEQHKHYLDEIIEQISEFSKRVILADANLDKVLSAYNKHRDKPIREQAENIIHLFTLTNLGAPAAFKYFDTTIDRKRYTSTKEVLDATLIHQSITGLYETRIDLSQLGGD

SEQ ID NO: 291 - protein, 1541 aa, synthetic construct
  REGION 1..1541: note = 116.2 Cas9 TadAins C-term truncate 791 polypeptide sequence
MDKKYSIGLAIGTNSVGWAVITDEYKVPSKKFKVLGNTDRHSIKKNLIGALLFDSGETAEATRLKRTARRRYTRRKNRICYLQEIFSNEMAKVDDSFFHRLEESFLVEEDKKHERHPIFGNIVDEVAYHEKYPTIYHLRKKLVDSTDKADLRLIYLALAHMIKFRGHFLIEGDLNPDNSDVDKLFIQLVQTYNQLFEENPINASGVDAKAILSARLSKSRRLENLIAQLPGEKKNGLFGNLIALSLGLTPNFKSNFDLAEDAKLQLSKDTYDDDLDNLLAQIGDQYADLFLAAKNLSDAILLSDILRVNTEITKAPLSASMIKRYDEHHQDLTLLKALVRQQLPEKYKEIFFDQSKNGYAGYIDGGASQEEFYKFIKPILEKMDGTEELLVKLNREDLLRKQRTFDNGSIPHQIHLGELHAILRRQEDFYPFLKDNREKIEKILTFRIPYYVGPLARGNSRFAWMTRKSEETITPWNFEEVVDKGASAQSFIERMTNFDKNLPNEKVLPKHSLLYEYFTVYNELTKVKYVTEGMRKPAFLSGEQKKAIVDLLFKTNRKVTVKQLKEDYFKKIECFDSVEISGVEDRFNASLGTYHDLLKIIKDKDFLDNEENEDILEDIVLTLTLFEDREMIEERLKTYAHLFDDKVMKQLKRRRYTGWGRLSRKLINGIRDKQSGKTILDFLKSDGFANRNFMQLIHDDSLTFKEDIQKAQVSGQGDSLHEHIANLAGSPAIKKGILQTVKVVDELVKVMGRHKPENIVIEMARENQTTQKGQKNSRERMKRIEEGIKELGSSGSETPGTSESATPESSGSEVEFSHEYWMRHALTLAKRARDEREVPVGAVLVLNNRVIGEGWNRAIGLHDPTAHAEIMALRQGGLVMQNYRLIDATLYVTFEPCVMCAGAMIHSRIGRVVFGVRNAKTGAAGSLMDVLHYPGMNHRVEITEGILADECAALLCYFFRMPRQGSQILKEHPVENTQLQNEKLYLYYLQNGRDMYVDQELDINRLSDYDVDHIVPQSFLKDDSIDNKVLTRSDKNRGKSDNVPSEEVVKKMKNYWRQLLNAKLITQRKFDNLTKAERGGLSELDKAGFIKRQLVETRQITKHVAQILDSRMNTKYDENDKLIREVKVITLKSKLVSDFRKDFQFYKVREINNYHHAHDAYLNAVVGTALIKKYPKLESEFVYGDYKVYDVRKMIAKSEQEIGKATAKYFFYSNIMNFFKTEITLANGEIRKRPLIETNGETGEIVWDKGRDFATVRKVLSMPQVNIVKKTEVQTGGFSKESILPKRNSDKLIARKKDWDPKKYGGFDSPTVAYSVLVVAKVEKGKSKKLKSVKELLGITIMERSSFEKNPIDFLEAKGYKEVKKDLIIKLPKYSLFELENGRKRMLASAGELQKGNELALPSKYVNFLYLASHYEKLKGSPEDNEQKQLFVEQHKHYLDEIIEQISEFSKRVILADANLDKVLSAYNKHRDKPIREQAENIIHLFTLTNLGAPAAFKYFDTTIDRKRYTSTKEVLDATLIHQSITGLYETRIDLSQLGGD

SEQ ID NO: 292 - protein, 1541 aa, synthetic construct
  REGION 1..1541: note = 116.3 Cas9 TadAins C-term truncate 790 polypeptide sequence
MDKKYSIGLAIGTNSVGWAVITDEYKVPSKKFKVLGNTDRHSIKKNLIGALLFDSGETAEATRLKRTARRRYTRRKNRICYLQEIFSNEMAKVDDSFFHRLEESFLVEEDKKHERHPIFGNIVDEVAYHEKYPTIYHLRKKLVDSTDKADLRLIYLALAHMIKFRGHFLIEGDLNPDNSDVDKLFIQLVQTYNQLFEENPINASGVDAKAILSARLSKSRRLENLIAQLPGEKKNGLFGNLIALSLGLTPNFKSNFDLAEDAKLQLSKDTYDDDLDNLLAQIGDQYADLFLAAKNLSDAILLSDILRVNTEITKAPLSASMIKRYDEHHQDLTLLKALVRQQLPEKYKEIFFDQSKNGYAGYIDGGASQEEFYKFIKPILEKMDGTEELLVKLNREDLLRKQRTFDNGSIPHQIHLGELHAILRRQEDFYPFLKDNREKIEKILTFRIPYYVGPLARGNSRFAWMTRKSEETITPWNFEEVVDKGASAQSFIERMTNFDKNLPNEKVLPKHSLLYEYFTVYNELTKVKYVTEGMRKPAFLSGEQKKAIVDLLFKTNRKVTVKQLKEDYFKKIECFDSVEISGVEDRFNASLGTYHDLLKIIKDKDFLDNEENEDILEDIVLTLTLFEDREMIEERLKTYAHLFDDKVMKQLKRRRYTGWGRLSRKLINGIRDKQSGKTILDFLKSDGFANRNFMQLIHDDSLTFKEDIQKAQVSGQGDSLHEHIANLAGSPAIKKGILQTVKVVDELVKVMGRHKPENIVIEMARENQTTQKGQKNSRERMKRIEEGIKEGSSGSETPGTSESATPESSGSEVEFSHEYWMRHALTLAKRARDEREVPVGAVLVLNNRVIGEGWNRAIGLHDPTAHAEIMALRQGGLVMQNYRLIDATLYVTFEPCVMCAGAMIHSRIGRVVFGVRNAKTGAAGSLMDVLHYPGMNHRVEITEGILADECAALLCYFFRMPRQLGSQILKEHPVENTQLQNEKLYLYYLQNGRDMYVDQELDINRLSDYDVDHIVPQSFLKDDSIDNKVLTRSDKNRGKSDNVPSEEVVKKMKNYWRQLLNAKLITQRKFDNLTKAERGGLSELDKAGFIKRQLVETRQITKHVAQILDSRMNTKYDENDKLIREVKVITLKSKLVSDFRKDFQFYKVREINNYHHAHDAYLNAVVGTALIKKYPKLESEFVYGDYKVYDVRKMIAKSEQEIGKATAKYFFYSNIMNFFKTEITLANGEIRKRPLIETNGETGEIVWDKGRDFATVRKVLSMPQVNIVKKTEVQTGGFSKESILPKRNSDKLIARKKDWDPKKYGGFDSPTVAYSVLVVAKVEKGKSKKLKSVKELLGITIMERSSFEKNPIDFLEAKGYKEVKKDLIIKLPKYSLFELENGRKRMLASAGELQKGNELALPSKYVNFLYLASHYEKLKGSPEDNEQKQLFVEQHKHYLDEIIEQISEFSKRVILADANLDKVLSAYNKHRDKPIREQAENIIHLFTLTNLGAPAAFKYFDTTIDRKRYTSTKEVLDATLIHQSITGLYETRIDLSQLGGD

SEQ ID NO: 293 - protein, 1484 aa, synthetic construct
  REGION 1..1484: note = 117 Cas9 delta 1017-1069 polypeptide sequence
MDKKYSIGLAIGTNSVGWAVITDEYKVPSKKFKVLGNTDRHSIKKNLIGALLFDSGETAEATRLKRTARRRYTRRKNRICYLQEIFSNEMAKVDDSFFHRLEESFLVEEDKKHERHPIFGNIVDEVAYHEKYPTIYHLRKKLVDSTDKADLRLIYLALAHMIKFRGHFLIEGDLNPDNSDVDKLFIQLVQTYNQLFEENPINASGVDAKAILSARLSKSRRLENLIAQLPGEKKNGLFGNLIALSLGLTPNFKSNFDLAEDAKLQLSKDTYDDDLDNLLAQIGDQYADLFLAAKNLSDAILLSDILRVNTEITKAPLSASMIKRYDEHHQDLTLLKALVRQQLPEKYKEIFFDQSKNGYAGYIDGGASQEEFYKFIKPILEKMDGTEELLVKLNREDLLRKQRTFDNGSIPHQIHLGELHAILRRQEDFYPFLKDNREKIEKILTFRIPYYVGPLARGNSRFAWMTRKSEETITPWNFEEVVDKGASAQSFIERMTNFDKNLPNEKVLPKHSLLYEYFTVYNELTKVKYVTEGMRKPAFLSGEQKKAIVDLLFKTNRKVTVKQLKEDYFKKIECFDSVEISGVEDRFNASLGTYHDLLKIIKDKDFLDNEENEDILEDIVLTLTLFEDREMIEERLKTYAHLFDDKVMKQLKRRRYTGWGRLSRKLINGIRDKQSGKTILDFLKSDGFANRNFMQLIHDDSLTFKEDIQKAQVSGQGDSLHEHIANLAGSPAIKKGILQTVKVVDELVKVMGRHKPENIVIEMARENQTTQKGQKNSRERMKRIEEGIKELGSQILKEHPVENTQLQNEKLYLYYLQNGRDMYVDQELDINRLSDYDVDHIVPQSFLKDDSIDNKVLTRSDKNRGKSDNVPSEEVVKKMKNYWRQLLNAKLITQRKFDNLTKAERGGLSELDKAGFIKRQLVETRQITKHVAQILDSRMNTKYDENDKLIREVKVITLKSKLVSDFRKDFQFYKVREINNYHHAHDAYLNAVVGTALIKKYPKLESEFVYGDYKVYSSGSEVEFSHEYWMRHALTLAKRARDEREVPVGAVLVLNNRVIGEGWNRAIGLHDPTAHAEIMALRQGGLVMQNYRLIDATLYVTFEPCVMCAGAMIHSRIGRVVFGVRNAKTGAAGSLMDVLHYPGMNHRVEITEGILADECAALLCYFFRMPRQVFNAQKKAQSSTDGEIVWDKGRDFATVRKVLSMPQVNIVKKTEVQTGGFSKESILPKRNSDKLIARKKDWDPKKYGGFDSPTVAYSVLVVAKVEKGKSKKLKSVKELLGITIMERSSFEKNPIDFLEAKGYKEVKKDLIIKLPKYSLFELENGRKRMLASAGELQKGNELALPSKYVNFLYLASHYEKLKGSPEDNEQKQLFVEQHKHYLDEIIEQISEFSKRVILADANLDKVLSAYNKHRDKPIREQAENIIHLFTLTNLGAPAAFKYFDTTIDRKRYTSTKEVLDATLIHQSITGLYETRIDLSQLGGD

SEQ ID NO: 294 - protein, 1554 aa, synthetic construct
  REGION 1..1554: note = 118 Cas9 TadA-CP116ins 1067 polypeptide sequence
MDKKYSIGLAIGTNSVGWAVITDEYKVPSKKFKVLGNTDRHSIKKNLIGALLFDSGETAEATRLKRTARRRYTRRKNRICYLQEIFSNEMAKVDDSFFHRLEESFLVEEDKKHERHPIFGNIVDEVAYHEKYPTIYHLRKKLVDSTDKADLRLIYLALAHMIKFRGHFLIEGDLNPDNSDVDKLFIQLVQTYNQLFEENPINASGVDAKAILSARLSKSRRLENLIAQLPGEKKNGLFGNLIALSLGLTPNFKSNFDLAEDAKLQLSKDTYDDDLDNLLAQIGDQYADLFLAAKNLSDAILLSDILRVNTEITKAPLSASMIKRYDEHHQDLTLLKALVRQQLPEKYKEIFFDQSKNGYAGYIDGGASQEEFYKFIKPILEKMDGTEELLVKLNREDLLRKQRTFDNGSIPHQIHLGELHAILRRQEDFYPFLKDNREKIEKILTFRIPYYVGPLARGNSRFAWMTRKSEETITPWNFEEVVDKGASAQSFIERMTNFDKNLPNEKVLPKHSLLYEYFTVYNELTKVKYVTEGMRKPAFLSGEQKKAIVDLLFKTNRKVTVKQLKEDYFKKIECFDSVEISGVEDRFNASLGTYHDLLKIIKDKDFLDNEENEDILEDIVLTLTLFEDREMIEERLKTYAHLFDDKVMKQLKRRRYTGWGRLSRKLINGIRDKQSGKTILDFLKSDGFANRNFMQLIHDDSLTFKEDIQKAQVSGQGDSLHEHIANLAGSPAIKKGILQTVKVVDELVKVMGRHKPENIVIEMARENQTTQKGQKNSRERMKRIEEGIKELGSQILKEHPVENTQLQNEKLYLYYLQNGRDMYVDQELDINRLSDYDVDHIVPQSFLKDDSIDNKVLTRSDKNRGKSDNVPSEEVVKKMKNYWRQLLNAKLITQRKFDNLTKAERGGLSELDKAGFIKRQLVETRQITKHVAQILDSRMNTKYDENDKLIREVKVITLKSKLVSDFRKDFQFYKVREINNYHHAHDAYLNAVVGTALIKKYPKLESEFVYGDYKVYDVRKMIAKSEQEIGKATAKYFFYSNIMNFFKTEITLANGEIRKRPLIETNMNHRVEITEGILADECAALLCYFFRMPRQVFNAQKKAQSSTDGSSGSETPGTSESATPESSGSEVEFSHEYWMRHALTLAKRARDEREVPVGAVLVLNNRVIGEGWNRAIGLHDPTAHAEIMALRQGGLVMQNYRLIDATLYVTFEPCVMCAGAMIHSRIGRVVFGVRNAKTGAAGSLMDVLHYPGGETGEIVWDKGRDFATVRKVLSMPQVNIVKKTEVQTGGFSKESILPKRNSDKLIARKKDWDPKKYGGFDSPTVAYSVLVVAKVEKGKSKKLKSVKELLGITIMERSSFEKNPIDFLEAKGYKEVKKDLIIKLPKYSLFELENGRKRMLASAGELQKGNELALPSKYVNFLYLASHYEKLKGSPEDNEQKQLFVEQHKHYLDEIIEQISEFSKRVILADANLDKVLSAYNKHRDKPIREQAENIIHLFTLTNLGAPAAFKYFDTTIDRKRYTSTKEVLDATLIHQSITGLYETRIDLSQLGGD

SEQ ID NO: 295 - protein, 1554 aa, synthetic construct
  REGION 1..1554: note = 119 Cas9 TadAins 701 polypeptide sequence
MDKKYSIGLAIGTNSVGWAVITDEYKVPSKKFKVLGNTDRHSIKKNLIGALLFDSGETAEATRLKRTARRRYTRRKNRICYLQEIFSNEMAKVDDSFFHRLEESFLVEEDKKHERHPIFGNIVDEVAYHEKYPTIYHLRKKLVDSTDKADLRLIYLALAHMIKFRGHFLIEGDLNPDNSDVDKLFIQLVQTYNQLFEENPINASGVDAKAILSARLSKSRRLENLIAQLPGEKKNGLFGNLIALSLGLTPNFKSNFDLAEDAKLQLSKDTYDDDLDNLLAQIGDQYADLFLAAKNLSDAILLSDILRVNTEITKAPLSASMIKRYDEHHQDLTLLKALVRQQLPEKYKEIFFDQSKNGYAGYIDGGASQEEFYKFIKPILEKMDGTEELLVKLNREDLLRKQRTFDNGSIPHQIHLGELHAILRRQEDFYPFLKDNREKIEKILTFRIPYYVGPLARGNSRFAWMTRKSEETITPWNFEEVVDKGASAQSFIERMTNFDKNLPNEKVLPKHSLLYEYFTVYNELTKVKYVTEGMRKPAFLSGEQKKAIVDLLFKTNRKVTVKQLKEDYFKKIECFDSVEISGVEDRFNASLGTYHDLLKIIKDKDFLDNEENEDILEDIVLTLTLFEDREMIEERLKTYAHLFDDKVMKQLKRRRYTGWGRLSRKLINGIRDKQSGKTILDFLKSDGFANRNFMQLIHDDSGSSGSETPGTSESATPESSGSEVEFSHEYWMRHALTLAKRARDEREVPVGAVLVLNNRVIGEGWNRAIGLHDPTAHAEIMALRQGGLVMQNYRLIDATLYVTFEPCVMCAGAMIHSRIGRVVFGVRNAKTGAAGSLMDVLHYPGMNHRVEITEGILADECAALLCYFFRMPRQVFNAQKKAQSSTDLTFKEDIQKAQVSGQGDSLHEHIANLAGSPAIKKGILQTVKVVDELVKVMGRHKPENIVIEMARENQTTQKGQKNSRERMKRIEEGIKELGSQILKEHPVENTQLQNEKLYLYYLQNGRDMYVDQELDINRLSDYDVDHIVPQSFLKDDSIDNKVLTRSDKNRGKSDNVPSEEVVKKMKNYWRQLLNAKLITQRKFDNLTKAERGGLSELDKAGFIKRQLVETRQITKHVAQILDSRMNTKYDENDKLIREVKVITLKSKLVSDFRKDFQFYKVREINNYHHAHDAYLNAVVGTALIKKYPKLESEFVYGDYKVYDVRKMIAKSEQEIGKATAKYFFYSNIMNFFKTEITLANGEIRKRPLIETNGETGEIVWDKGRDFATVRKVLSMPQVNIVKKTEVQTGGFSKESILPKRNSDKLIARKKDWDPKKYGGFDSPTVAYSVLVVAKVEKGKSKKLKSVKELLGITIMERSSFEKNPIDFLEAKGYKEVKKDLIIKLPKYSLFELENGRKRMLASAGELQKGNELALPSKYVNFLYLASHYEKLKGSPEDNEQKQLFVEQHKHYLDEIIEQISEFSKRVILADANLDKVLSAYNKHRDKPIREQAENIIHLFTLTNLGAPAAFKYFDTTIDRKRYTSTKEVLDATLIHQSITGLYETRIDLSQLGGD

SEQ ID NO: 296 - protein, 1554 aa, synthetic construct
  REGION 1..1554: note = 120 Cas9 TadACP136ins 1248 polypeptide sequence
MDKKYSIGLAIGTNSVGWAVITDEYKVPSKKFKVLGNTDRHSIKKNLIGALLFDSGETAEATRLKRTARRRYTRRKNRICYLQEIFSNEMAKVDDSFFHRLEESFLVEEDKKHERHPIFGNIVDEVAYHEKYPTIYHLRKKLVDSTDKADLRLIYLALAHMIKFRGHFLIEGDLNPDNSDVDKLFIQLVQTYNQLFEENPINASGVDAKAILSARLSKSRRLENLIAQLPGEKKNGLFGNLIALSLGLTPNFKSNFDLAEDAKLQLSKDTYDDDLDNLLAQIGDQYADLFLAAKNLSDAILLSDILRVNTEITKAPLSASMIKRYDEHHQDLTLLKALVRQQLPEKYKEIFFDQSKNGYAGYIDGGASQEEFYKFIKPILEKMDGTEELLVKLNREDLLRKQRTFDNGSIPHQIHLGELHAILRRQEDFYPFLKDNREKIEKILTFRIPYYVGPLARGNSRFAWMTRKSEETITPWNFEEVVDKGASAQSFIERMTNFDKNLPNEKVLPKHSLLYEYFTVYNELTKVKYVTEGMRKPAFLSGEQKKAIVDLLFKTNRKVTVKQLKEDYFKKIECFDSVEISGVEDRFNASLGTYHDLLKIIKDKDFLDNEENEDILEDIVLTLTLFEDREMIEERLKTYAHLFDDKVMKQLKRRRYTGWGRLSRKLINGIRDKQSGKTILDFLKSDGFANRNFMQLIHDDSLTFKEDIQKAQVSGQGDSLHEHIANLAGSPAIKKGILQTVKVVDELVKVMGRHKPENIVIEMARENQTTQKGQKNSRERMKRIEEGIKELGSQILKEHPVENTQLQNEKLYLYYLQNGRDMYVDQELDINRLSDYDVDHIVPQSFLKDDSIDNKVLTRSDKNRGKSDNVPSEEVVKKMKNYWRQLLNAKLITQRKFDNLTKAERGGLSELDKAGFIKRQLVETRQITKHVAQILDSRMNTKYDENDKLIREVKVITLKSKLVSDFRKDFQFYKVREINNYHHAHDAYLNAVVGTALIKKYPKLESEFVYGDYKVYDVRKMIAKSEQEIGKATAKYFFYSNIMNFFKTEITLANGEIRKRPLIETNGETGEIVWDKGRDFATVRKVLSMPQVNIVKKTEVQTGGFSKESILPKRNSDKLIARKKDWDPKKYGGFDSPTVAYSVLVVAKVEKGKSKKLKSVKELLGITIMERSSFEKNPIDFLEAKGYKEVKKDLIIKLPKYSLFELENGRKRMLASAGELQKGNELALPSKYVNFLYLASHYEKLKGSMNHRVEITEGILADECAALLCYFFRMPRQVFNAQKKAQSSTDGSSGSETPGTSESATPESSGSEVEFSHEYWMRHALTLAKRARDEREVPVGAVLVLNNRVIGEGWNRAIGLHDPTAHAEIMALRQGGLVMQNYRLIDATLYVTFEPCVMCAGAMIHSRIGRVVFGVRNAKTGAAGSLMDVLHYPGPEDNEQKQLFVEQHKHYLDEIIEQISEFSKRVILADANLDKVLSAYNKHRDKPIREQAENIIHLFTLTNLGAPAAFKYFDTTIDRKRYTSTKEVLDATLIHQSITGLYETRIDLSQLGGD

SEQ ID NO: 297 - protein, 1554 aa, synthetic construct
  REGION 1..1554: note = 121 Cas9 TadACP136ins 1052 polypeptide sequence
MDKKYSIGLAIGTNSVGWAVITDEYKVPSKKFKVLGNTDRHSIKKNLIGALLFDSGETAEATRLKRTARRRYTRRKNRICYLQEIFSNEMAKVDDSFFHRLEESFLVEEDKKHERHPIFGNIVDEVAYHEKYPTIYHLRKKLVDSTDKADLRLIYLALAHMIKFRGHFLIEGDLNPDNSDVDKLFIQLVQTYNQLFEENPINASGVDAKAILSARLSKSRRLENLIAQLPGEKKNGLFGNLIALSLGLTPNFKSNFDLAEDAKLQLSKDTYDDDLDNLLAQIGDQYADLFLAAKNLSDAILLSDILRVNTEITKAPLSASMIKRYDEHHQDLTLLKALVRQQLPEKYKEIFFDQSKNGYAGYIDGGASQEEFYKFIKPILEKMDGTEELLVKLNREDLLRKQRTFDNGSIPHQIHLGELHAILRRQEDFYPFLKDNREKIEKILTFRIPYYVGPLARGNSRFAWMTRKSEETITPWNFEEVVDKGASAQSFIERMTNFDKNLPNEKVLPKHSLLYEYFTVYNELTKVKYVTEGMRKPAFLSGEQKKAIVDLLFKTNRKVTVKQLKEDYFKKIECFDSVEISGVEDRFNASLGTYHDLLKIIKDKDFLDNEENEDILEDIVLTLTLFEDREMIEERLKTYAHLFDDKVMKQLKRRRYTGWGRLSRKLINGIRDKQSGKTILDFLKSDGFANRNFMQLIHDDSLTFKEDIQKAQVSGQGDSLHEHIANLAGSPAIKKGILQTVKVVDELVKVMGRHKPENIVIEMARENQTTQKGQKNSRERMKRIEEGIKELGSQILKEHPVENTQLQNEKLYLYYLQNGRDMYVDQELDINRLSDYDVDHIVPQSFLKDDSIDNKVLTRSDKNRGKSDNVPSEEVVKKMKNYWRQLLNAKLITQRKFDNLTKAERGGLSELDKAGFIKRQLVETRQITKHVAQILDSRMNTKYDENDKLIREVKVITLKSKLVSDFRKDFQFYKVREINNYHHAHDAYLNAVVGTALIKKYPKLESEFVYGDYKVYDVRKMIAKSEQEIGKATAKYFFYSNIMNFFKTEITLAMNHRVEITEGILADECAALLCYFFRMPRQVFNAQKKAQSSTDGSSGSETPGTSESATPESSGSEVEFSHEYWMRHALTLAKRARDEREVPVGAVLVLNNRVIGEGWNRAIGLHDPTAHAEIMALRQGGLVMQNYRLIDATLYVTFEPCVMCAGAMIHSRIGRVVFGVRNAKTGAAGSLMDVLHYPGNGEIRKRPLIETNGETGEIVWDKGRDFATVRKVLSMPQVNIVKKTEVQTGGFSKESILPKRNSDKLIARKKDWDPKKYGGFDSPTVAYSVLVVAKVEKGKSKKLKSVKELLGITIMERSSFEKNPIDFLEAKGYKEVKKDLIIKLPKYSLFELENGRKRMLASAGELQKGNELALPSKYVNFLYLASHYEKLKGSPEDNEQKQLFVEQHKHYLDEIIEQISEFSKRVILADANLDKVLSAYNKHRDKPIREQAENIIHLFTLTNLGAPAAFKYFDTTIDRKRYTSTKEVLDATLIHQSITGLYETRIDLSQLGGD

SEQ ID NO: 298 - protein, 1554 aa, synthetic construct
  REGION 1..1554: note = 122 Cas9 TadACP136ins 1041 polypeptide sequence
MDKKYSIGLAIGTNSVGWAVITDEYKVPSKKFKVLGNTDRHSIKKNLIGALLFDSGETAEATRLKRTARRRYTRRKNRICYLQEIFSNEMAKVDDSFFHRLEESFLVEEDKKHERHPIFGNIVDEVAYHEKYPTIYHLRKKLVDSTDKADLRLIYLALAHMIKFRGHFLIEGDLNPDNSDVDKLFIQLVQTYNQLFEENPINASGVDAKAILSARLSKSRRLENLIAQLPGEKKNGLFGNLIALSLGLTPNFKSNFDLAEDAKLQLSKDTYDDDLDNLLAQIGDQYADLFLAAKNLSDAILLSDILRVNTEITKAPLSASMIKRYDEHHQDLTLLKALVRQQLPEKYKEIFFDQSKNGYAGYIDGGASQEEFYKFIKPILEKMDGTEELLVKLNREDLLRKQRTFDNGSIPHQIHLGELHAILRRQEDFYPFLKDNREKIEKILTFRIPYYVGPLARGNSRFAWMTRKSEETITPWNFEEVVDKGASAQSFIERMTNFDKNLPNEKVLPKHSLLYEYFTVYNELTKVKYVTEGMRKPAFLSGEQKKAIVDLLFKTNRKVTVKQLKEDYFKKIECFDSVEISGVEDRFNASLGTYHDLLKIIKDKDFLDNEENEDILEDIVLTLTLFEDREMIEERLKTYAHLFDDKVMKQLKRRRYTGWGRLSRKLINGIRDKQSGKTILDFLKSDGFANRNFMQLIHDDSLTFKEDIQKAQVSGQGDSLHEHIANLAGSPAIKKGILQTVKVVDELVKVMGRHKPENIVIEMARENQTTQKGQKNSRERMKRIEEGIKELGSQILKEHPVENTQLQNEKLYLYYLQNGRDMYVDQELDINRLSDYDVDHIVPQSFLKDDSIDNKVLTRSDKNRGKSDNVPSEEVVKKMKNYWRQLLNAKLITQRKFDNLTKAERGGLSELDKAGFIKRQLVETRQITKHVAQILDSRMNTKYDENDKLIREVKVITLKSKLVSDFRKDFQFYKVREINNYHHAHDAYLNAVVGTALIKKYPKLESEFVYGDYKVYDVRKMIAKSEQEIGKATAKYFFYSMNHRVEITEGILADECAALLCYFFRMPRQVFNAQKKAQSSTDGSSGSETPGTSESATPESSGSEVEFSHEYWMRHALTLAKRARDEREVPVGAVLVLNNRVIGEGWNRAIGLHDPTAHAEIMALRQGGLVMQNYRLIDATLYVTFEPCVMCAGAMIHSRIGRVVFGVRNAKTGAAGSLMDVLHYPGNIMNFFKTEITLANGEIRKRPLIETNGETGEIVWDKGRDFATVRKVLSMPQVNIVKKTEVQTGGFSKESILPKRNSDKLIARKKDWDPKKYGGFDSPTVAYSVLVVAKVEKGKSKKLKSVKELLGITIMERSSFEKNPIDFLEAKGYKEVKKDLIIKLPKYSLFELENGRKRMLASAGELQKGNELALPSKYVNFLYLASHYEKLKGSPEDNEQKQLFVEQHKHYLDEIIEQISEFSKRVILADANLDKVLSAYNKHRDKPIREQAENIIHLFTLTNLGAPAAFKYFDTTIDRKRYTSTKEVLDATLIHQSITGLYETRIDLSQLGGD

SEQ ID NO: 299 - protein, 1554 aa, synthetic construct
  REGION 1..1554: note = 123 Cas9 TadACP139ins 1299 polypeptide sequence
MDKKYSIGLAIGTNSVGWAVITDEYKVPSKKFKVLGNTDRHSIKKNLIGALLFDSGETAEATRLKRTARRRYTRRKNRICYLQEIFSNEMAKVDDSFFHRLEESFLVEEDKKHERHPIFGNIVDEVAYHEKYPTIYHLRKKLVDSTDKADLRLIYLALAHMIKFRGHFLIEGDLNPDNSDVDKLFIQLVQTYNQLFEENPINASGVDAKAILSARLSKSRRLENLIAQLPGEKKNGLFGNLIALSLGLTPNFKSNFDLAEDAKLQLSKDTYDDDLDNLLAQIGDQYADLFLAAKNLSDAILLSDILRVNTEITKAPLSASMIKRYDEHHQDLTLLKALVRQQLPEKYKEIFFDQSKNGYAGYIDGGASQEEFYKFIKPILEKMDGTEELLVKLNREDLLRKQRTFDNGSIPHQIHLGELHAILRRQEDFYPFLKDNREKIEKILTFRIPYYVGPLARGNSRFAWMTRKSEETITPWNFEEVVDKGASAQSFIERMTNFDKNLPNEKVLPKHSLLYEYFTVYNELTKVKYVTEGMRKPAFLSGEQKKAIVDLLFKTNRKVTVKQLKEDYFKKIECFDSVEISGVEDRFNASLGTYHDLLKIIKDKDFLDNEENEDILEDIVLTLTLFEDREMIEERLKTYAHLFDDKVMKQLKRRRYTGWGRLSRKLINGIRDKQSGKTILDFLKSDGFANRNFMQLIHDDSLTFKEDIQKAQVSGQGDSLHEHIANLAGSPAIKKGILQTVKVVDELVKVMGRHKPENIVIEMARENQTTQKGQKNSRERMKRIEEGIKELGSQILKEHPVENTQLQNEKLYLYYLQNGRDMYVDQELDINRLSDYDVDHIVPQSFLKDDSIDNKVLTRSDKNRGKSDNVPSEEVVKKMKNYWRQLLNAKLITQRKFDNLTKAERGGLSELDKAGFIKRQLVETRQITKHVAQILDSRMNTKYDENDKLIREVKVITLKSKLVSDFRKDFQFYKVREINNYHHAHDAYLNAVVGTALIKKYPKLESEFVYGDYKVYDVRKMIAKSEQEIGKATAKYFFYSNIMNFFKTEITLANGEIRKRPLIETNGETGEIVWDKGRDFATVRKVLSMPQVNIVKKTEVQTGGFSKESILPKRNSDKLIARKKDWDPKKYGGFDSPTVAYSVLVVAKVEKGKSKKLKSVKELLGITIMERSSFEKNPIDFLEAKGYKEVKKDLIIKLPKYSLFELENGRKRMLASAGELQKGNELALPSKYVNFLYLASHYEKLKGSPEDNEQKQLFVEQHKHYLDEIIEQISEFSKRVILADANLDKVLSAYNKHRMNHRVEITEGILADECAALLCYFFRMPRQVFNAQKKAQSSTDGSSGSETPGTSESATPESSGSEVEFSHEYWMRHALTLAKRARDEREVPVGAVLVLNNRVIGEGWNRAIGLHDPTAHAEIMALRQGGLVMQNYRLIDATLYVTFEPCVMCAGAMIHSRIGRVVFGVRNAKTGAAGSLMDVLHYPGDKPIREQAENIIHLFTLTNLGAPAAFKYFDTTIDRKRYTSTKEVLDATLIHQSITGLYETRIDLSQLGGD

SEQ ID NO: 300 - protein, 1454 aa, synthetic construct
  REGION 1..1454: note = 124 Cas9 delta 792-872TadAins polypeptide sequence
MDKKYSIGLAIGTNSVGWAVITDEYKVPSKKFKVLGNTDRHSIKKNLIGALLFDSGETAEATRLKRTARRRYTRRKNRICYLQEIFSNEMAKVDDSFFHRLEESFLVEEDKKHERHPIFGNIVDEVAYHEKYPTIYHLRKKLVDSTDKADLRLIYLALAHMIKFRGHFLIEGDLNPDNSDVDKLFIQLVQTYNQLFEENPINASGVDAKAILSARLSKSRRLENLIAQLPGEKKNGLFGNLIALSLGLTPNFKSNFDLAEDAKLQLSKDTYDDDLDNLLAQIGDQYADLFLAAKNLSDAILLSDILRVNTEITKAPLSASMIKRYDEHHQDLTLLKALVRQQLPEKYKEIFFDQSKNGYAGYIDGGASQEEFYKFIKPILEKMDGTEELLVKLNREDLLRKQRTFDNGSIPHQIHLGELHAILRRQEDFYPFLKDNREKIEKILTFRIPYYVGPLARGNSRFAWMTRKSEETITPWNFEEVVDKGASAQSFIERMTNFDKNLPNEKVLPKHSLLYEYFTVYNELTKVKYVTEGMRKPAFLSGEQKKAIVDLLFKTNRKVTVKQLKEDYFKKIECFDSVEISGVEDRFNASLGTYHDLLKIIKDKDFLDNEENEDILEDIVLTLTLFEDREMIEERLKTYAHLFDDKVMKQLKRRRYTGWGRLSRKLINGIRDKQSGKTILDFLKSDGFANRNFMQLIHDDSLTFKEDIQKAQVSGQGDSLHEHIANLAGSPAIKKGILQTVKVVDELVKVMGRHKPENIVIEMARENQTTQKGQKNSRERMKRIEEGIKELGSEVEFSHEYWMRHALTLAKRARDEREVPVGAVLVLNNRVIGEGWNRAIGLHDPTAHAEIMALRQGGLVMQNYRLIDATLYVTFEPCVMCAGAMIHSRIGRVVFGVRNAKTGAAGSLMDVLHYPGMNHRVEITEGILADECAALLCYFFRMPRQVFNAQKKAQSSTDEEVVKKMKNYWRQLLNAKLITQRKFDNLTKAERGGLSELDKAGFIKRQLVETRQITKHVAQILDSRMNTKYDENDKLIREVKVITLKSKLVSDFRKDFQFYKVREINNYHHAHDAYLNAVVGTALIKKYPKLESEFVYGDYKVYDVRKMIAKSEQEIGKATAKYFFYSNIMNFFKTEITLANGEIRKRPLIETNGETGEIVWDKGRDFATVRKVLSMPQVNIVKKTEVQTGGFSKESILPKRNSDKLIARKKDWDPKKYGGFDSPTVAYSVLVVAKVEKGKSKKLKSVKELLGITIMERSSFEKNPIDFLEAKGYKEVKKDLIIKLPKYSLFELENGRKRMLASAGELQKGNELALPSKYVNFLYLASHYEKLKGSPEDNEQKQLFVEQHKHYLDEIIEQISEFSKRVILADANLDKVLSAYNKHRDKPIREQAENIIHLFTLTNLGAPAAFKYFDTTIDRKRYTSTKEVLDATLIHQSITGLYETRIDLSQLGGD

SEQ ID NO: 301 - protein, 1420 aa, synthetic construct
  REGION 1..1420: note = 125 Cas9 delta 792-906TadAins polypeptide sequence
MDKKYSIGLAIGTNSVGWAVITDEYKVPSKKFKVLGNTDRHSIKKNLIGALLFDSGETAEATRLKRTARRRYTRRKNRICYLQEIFSNEMAKVDDSFFHRLEESFLVEEDKKHERHPIFGNIVDEVAYHEKYPTIYHLRKKLVDSTDKADLRLIYLALAHMIKFRGHFLIEGDLNPDNSDVDKLFIQLVQTYNQLFEENPINASGVDAKAILSARLSKSRRLENLIAQLPGEKKNGLFGNLIALSLGLTPNFKSNFDLAEDAKLQLSKDTYDDDLDNLLAQIGDQYADLFLAAKNLSDAILLSDILRVNTEITKAPLSASMIKRYDEHHQDLTLLKALVRQQLPEKYKEIFFDQSKNGYAGYIDGGASQEEFYKFIKPILEKMDGTEELLVKLNREDLLRKQRTFDNGSIPHQIHLGELHAILRRQEDFYPFLKDNREKIEKILTFRIPYYVGPLARGNSRFAWMTRKSEETITPWNFEEVVDKGASAQSFIERMTNFDKNLPNEKVLPKHSLLYEYFTVYNELTKVKYVTEGMRKPAFLSGEQKKAIVDLLFKTNRKVTVKQLKEDYFKKIECFDSVEISGVEDRFNASLGTYHDLLKIIKDKDFLDNEENEDILEDIVLTLTLFEDREMIEERLKTYAHLFDDKVMKQLKRRRYTGWGRLSRKLINGIRDKQSGKTILDFLKSDGFANRNFMQLIHDDSLTFKEDIQKAQVSGQGDSLHEHIANLAGSPAIKKGILQTVKVVDELVKVMGRHKPENIVIEMARENQTTQKGQKNSRERMKRIEEGIKELGSEVEFSHEYWMRHALTLAKRARDEREVPVGAVLVLNNRVIGEGWNRAIGLHDPTAHAEIMALRQGGLVMQNYRLIDATLYVTFEPCVMCAGAMIHSRIGRVVFGVRNAKTGAAGSLMDVLHYPGMNHRVEITEGILADECAALLCYFFRMPRQVFNAQKKAQSSTDGLSELDKAGFIKRQLVETRQITKHVAQILDSRMNTKYDENDKLIREVKVITLKSKLVSDFRKDFQFYKVREINNYHHAHDAYLNAVVGTALIKKYPKLESEFVYGDYKVYDVRKMIAKSEQEIGKATAKYFFYSNIMNFFKTEITLANGEIRKRPLIETNGETGEIVWDKGRDFATVRKVLSMPQVNIVKKTEVQTGGFSKESILPKRNSDKLIARKKDWDPKKYGGFDSPTVAYSVLVVAKVEKGKSKKLKSVKELLGITIMERSSFEKNPIDFLEAKGYKEVKKDLIIKLPKYSLFELENGRKRMLASAGELQKGNELALPSKYVNFLYLASHYEKLKGSPEDNEQKQLFVEQHKHYLDEIIEQISEFSKRVILADANLDKVLSAYNKHRDKPIREQAENIIHLFTLTNLGAPAAFKYFDTTIDRKRYTSTKEVLDATLIHQSITGLYETRIDLSQLGGD

SEQ ID NO: 302 - protein, 1554 aa, synthetic construct
  REGION 1..1554: note = 126 TadA CP65ins 1003 polypeptide sequence
MDKKYSIGLAIGTNSVGWAVITDEYKVPSKKFKVLGNTDRHSIKKNLIGALLFDSGETAEATRLKRTARRRYTRRKNRICYLQEIFSNEMAKVDDSFFHRLEESFLVEEDKKHERHPIFGNIVDEVAYHEKYPTIYHLRKKLVDSTDKADLRLIYLALAHMIKFRGHFLIEGDLNPDNSDVDKLFIQLVQTYNQLFEENPINASGVDAKAILSARLSKSRRLENLIAQLPGEKKNGLFGNLIALSLGLTPNFKSNFDLAEDAKLQLSKDTYDDDLDNLLAQIGDQYADLFLAAKNLSDAILLSDILRVNTEITKAPLSASMIKRYDEHHQDLTLLKALVRQQLPEKYKEIFFDQSKNGYAGYIDGGASQEEFYKFIKPILEKMDGTEELLVKLNREDLLRKQRTFDNGSIPHQIHLGELHAILRRQEDFYPFLKDNREKIEKILTFRIPYYVGPLARGNSRFAWMTRKSEETITPWNFEEVVDKGASAQSFIERMTNFDKNLPNEKVLPKHSLLYEYFTVYNELTKVKYVTEGMRKPAFLSGEQKKAIVDLLFKTNRKVTVKQLKEDYFKKIECFDSVEISGVEDRFNASLGTYHDLLKIIKDKDFLDNEENEDILEDIVLTLTLFEDREMIEERLKTYAHLFDDKVMKQLKRRRYTGWGRLSRKLINGIRDKQSGKTILDFLKSDGFANRNFMQLIHDDSLTFKEDIQKAQVSGQGDSLHEHIANLAGSPAIKKGILQTVKVVDELVKVMGRHKPENIVIEMARENQTTQKGQKNSRERMKRIEEGIKELGSQILKEHPVENTQLQNEKLYLYYLQNGRDMYVDQELDINRLSDYDVDHIVPQSFLKDDSIDNKVLTRSDKNRGKSDNVPSEEVVKKMKNYWRQLLNAKLITQRKFDNLTKAERGGLSELDKAGFIKRQLVETRQITKHVAQILDSRMNTKYDENDKLIREVKVITLKSKLVSDFRKDFQFYKVREINNYHHAHDAYLNAVVGTALIKKYPKTAHAEIMALRQGGLVMQNYRLIDATLYVTFEPCVMCAGAMIHSRIGRVVFGVRNAKTGAAGSLMDVLHYPGMNHRVEITEGILADECAALLCYFFRMPRQVFNAQKKAQSSTDGSSGSETPGTSESATPESSGSEVEFSHEYWMRHALTLAKRARDEREVPVGAVLVLNNRVIGEGWNRAIGLHDPLESEFVYGDYKVYDVRKMIAKSEQEIGKATAKYFFYSNIMNFFKTEITLANGEIRKRPLIETNGETGEIVWDKGRDFATVRKVLSMPQVNIVKKTEVQTGGFSKESILPKRNSDKLIARKKDWDPKKYGGFDSPTVAYSVLVVAKVEKGKSKKLKSVKELLGITIMERSSFEKNPIDFLEAKGYKEVKKDLIIKLPKYSLFELENGRKRMLASAGELQKGNELALPSKYVNFLYLASHYEKLKGSPEDNEQKQLFVEQHKHYLDEIIEQISEFSKRVILADANLDKVLSAYNKHRDKPIREQAENIIHLFTLTNLGAPAAFKYFDTTIDRKRYTSTKEVLDATLIHQSITGLYETRIDLSQLGGD

SEQ ID NO: 303 - protein, 1554 aa, synthetic construct
  REGION 1..1554: note = 127 TadA CP65ins 1016 polypeptide sequence
MDKKYSIGLAIGTNSVGWAVITDEYKVPSKKFKVLGNTDRHSIKKNLIGALLFDSGETAEATRLKRTARRRYTRRKNRICYLQEIFSNEMAKVDDSFFHRLEESFLVEEDKKHERHPIFGNIVDEVAYHEKYPTIYHLRKKLVDSTDKADLRLIYLALAHMIKFRGHFLIEGDLNPDNSDVDKLFIQLVQTYNQLFEENPINASGVDAKAILSARLSKSRRLENLIAQLPGEKKNGLFGNLIALSLGLTPNFKSNFDLAEDAKLQLSKDTYDDDLDNLLAQIGDQYADLFLAAKNLSDAILLSDILRVNTEITKAPLSASMIKRYDEHHQDLTLLKALVRQQLPEKYKEIFFDQSKNGYAGYIDGGASQEEFYKFIKPILEKMDGTEELLVKLNREDLLRKQRTFDNGSIPHQIHLGELHAILRRQEDFYPFLKDNREKIEKILTFRIPYYVGPLARGNSRFAWMTRKSEETITPWNFEEVVDKGASAQSFIERMTNFDKNLPNEKVLPKHSLLYEYFTVYNELTKVKYVTEGMRKPAFLSGEQKKAIVDLLFKTNRKVTVKQLKEDYFKKIECFDSVEISGVEDRFNASLGTYHDLLKIIKDKDFLDNEENEDILEDIVLTLTLFEDREMIEERLKTYAHLFDDKVMKQLKRRRYTGWGRLSRKLINGIRDKQSGKTILDFLKSDGFANRNFMQLIHDDSLTFKEDIQKAQVSGQGDSLHEHIANLAGSPAIKKGILQTVKVVDELVKVMGRHKPENIVIEMARENQTTQKGQKNSRERMKRIEEGIKELGSQILKEHPVENTQLQNEKLYLYYLQNGRDMYVDQELDINRLSDYDVDHIVPQSFLKDDSIDNKVLTRSDKNRGKSDNVPSEEVVKKMKNYWRQLLNAKLITQRKFDNLTKAERGGLSELDKAGFIKRQLVETRQITKHVAQILDSRMNTKYDENDKLIREVKVITLKSKLVSDFRKDFQFYKVREINNYHHAHDAYLNAVVGTALIKKYPKLESEFVYGDYKVTAHAEIMALRQGGLVMQNYRLIDATLYVTFEPCVMCAGAMIHSRIGRVVFGVRNAKTGAAGSLMDVLHYPGMNHRVEITEGILADECAALLCYFFRMPRQVFNAQKKAQSSTDGSSGSETPGTSESATPESSGSEVEFSHEYWMRHALTLAKRARDEREVPVGAVLVLNNRVIGEGWNRAIGLHDPYDVRKMIAKSEQEIGKATAKYFFYSNIMNFFKTEITLANGEIRKRPLIETNGETGEIVWDKGRDFATVRKVLSMPQVNIVKKTEVQTGGFSKESILPKRNSDKLIARKKDWDPKKYGGFDSPTVAYSVLVVAKVEKGKSKKLKSVKELLGITIMERSSFEKNPIDFLEAKGYKEVKKDLIIKLPKYSLFELENGRKRMLASAGELQKGNELALPSKYVNFLYLASHYEKLKGSPEDNEQKQLFVEQHKHYLDEIIEQISEFSKRVILADANLDKVLSAYNKHRDKPIREQAENIIHLFTLTNLGAPAAFKYFDTTIDRKRYTSTKEVLDATLIHQSITGLYETRIDLSQLGGD

SEQ ID NO: 304 - protein, 1554 aa, synthetic construct
  REGION 1..1554: note = 128 TadA CP65ins 1022 polypeptide sequence
MDKKYSIGLAIGTNSVGWAVITDEYKVPSKKFKVLGNTDRHSIKKNLIGALLFDSGETAEATRLKRTARRRYTRRKNRICYLQEIFSNEMAKVDDSFFHRLEESFLVEEDKKHERHPIFGNIVDEVAYHEKYPTIYHLRKKLVDSTDKADLRLIYLALAHMIKFRGHFLIEGDLNPDNSDVDKLFIQLVQTYNQLFEENPINASGVDAKAILSARLSKSRRLENLIAQLPGEKKNGLFGNLIALSLGLTPNFKSNFDLAEDAKLQLSKDTYDDDLDNLLAQIGDQYADLFLAAKNLSDAILLSDILRVNTEITKAPLSASMIKRYDEHHQDLTLLKALVRQQLPEKYKEIFFDQSKNGYAGYIDGGASQEEFYKFIKPILEKMDGTEELLVKLNREDLLRKQRTFDNGSIPHQIHLGELHAILRRQEDFYPFLKDNREKIEKILTFRIPYYVGPLARGNSRFAWMTRKSEETITPWNFEEVVDKGASAQSFIERMTNFDKNLPNEKVLPKHSLLYEYFTVYNELTKVKYVTEGMRKPAFLSGEQKKAIVDLLFKTNRKVTVKQLKEDYFKKIECFDSVEISGVEDRFNASLGTYHDLLKIIKDKDFLDNEENEDILEDIVLTLTLFEDREMIEERLKTYAHLFDDKVMKQLKRRRYTGWGRLSRKLINGIRDKQSGKTILDFLKSDGFANRNFMQLIHDDSLTFKEDIQKAQVSGQGDSLHEHIANLAGSPAIKKGILQTVKVVDELVKVMGRHKPENIVIEMARENQTTQKGQKNSRERMKRIEEGIKELGSQILKEHPVENTQLQNEKLYLYYLQNGRDMYVDQELDINRLSDYDVDHIVPQSFLKDDSIDNKVLTRSDKNRGKSDNVPSEEVVKKMKNYWRQLLNAKLITQRKFDNLTKAERGGLSELDKAGFIKRQLVETRQITKHVAQILDSRMNTKYDENDKLIREVKVITLKSKLVSDFRKDFQFYKVREINNYHHAHDAYLNAVVGTALIKKYPKLESEFVYGDYKVYDVRKMITAHAEIMALRQGGLVMQNYRLIDATLYVTFEPCVMCAGAMIHSRIGRVVFGVRNAKTGAAGSLMDVLHYPGMNHRVEITEGILADECAALLCYFFRMPRQVFNAQKKAQSSTDGSSGSETPGTSESATPESSGSEVEFSHEYWMRHALTLAKRARDEREVPVGAVLVLNNRVIGEGWNRAIGLHDPAKSEQEIGKATAKYFFYSNIMNFFKTEITLANGEIRKRPLIETNGETGEIVWDKGRDFATVRKVLSMPQVNIVKKTEVQTGGFSKESILPKRNSDKLIARKKDWDPKKYGGFDSPTVAYSVLVVAKVEKGKSKKLKSVKELLGITIMERSSFEKNPIDFLEAKGYKEVKKDLIIKLPKYSLFELENGRKRMLASAGELQKGNELALPSKYVNFLYLASHYEKLKGSPEDNEQKQLFVEQHKHYLDEIIEQISEFSKRVILADANLDKVLSAYNKHRDKPIREQAENIIHLFTLTNLGAPAAFKYFDTTIDRKRYTSTKEVLDATLIHQSITGLYETRIDLSQLGGD

SEQ ID NO: 305 - protein, 1554 aa, synthetic construct
  REGION 1..1554: note = 129 TadA CP65ins 1029 polypeptide sequence
MDKKYSIGLAIGTNSVGWAVITDEYKVPSKKFKVLGNTDRHSIKKNLIGALLFDSGETAEATRLKRTARRRYTRRKNRICYLQEIFSNEMAKVDDSFFHRLEESFLVEEDKKHERHPIFGNIVDEVAYHEKYPTIYHLRKKLVDSTDKADLRLIYLALAHMIKFRGHFLIEGDLNPDNSDVDKLFIQLVQTYNQLFEENPINASGVDAKAILSARLSKSRRLENLIAQLPGEKKNGLFGNLIALSLGLTPNFKSNFDLAEDAKLQLSKDTYDDDLDNLLAQIGDQYADLFLAAKNLSDAILLSDILRVNTEITKAPLSASMIKRYDEHHQDLTLLKALVRQQLPEKYKEIFFDQSKNGYAGYIDGGASQEEFYKFIKPILEKMDGTEELLVKLNREDLLRKQRTFDNGSIPHQIHLGELHAILRRQEDFYPFLKDNREKIEKILTFRIPYYVGPLARGNSRFAWMTRKSEETITPWNFEEVVDKGASAQSFIERMTNFDKNLPNEKVLPKHSLLYEYFTVYNELTKVKYVTEGMRKPAFLSGEQKKAIVDLLFKTNRKVTVKQLKEDYFKKIECFDSVEISGVEDRFNASLGTYHDLLKIIKDKDFLDNEENEDILEDIVLTLTLFEDREMIEERLKTYAHLFDDKVMKQLKRRRYTGWGRLSRKLINGIRDKQSGKTILDFLKSDGFANRNFMQLIHDDSLTFKEDIQKAQVSGQGDSLHEHIANLAGSPAIKKGILQTVKVVDELVKVMGRHKPENIVIEMARENQTTQKGQKNSRERMKRIEEGIKELGSQILKEHPVENTQLQNEKLYLYYLQNGRDMYVDQELDINRLSDYDVDHIVPQSFLKDDSIDNKVLTRSDKNRGKSDNVPSEEVVKKMKNYWRQLLNAKLITQRKFDNLTKAERGGLSELDKAGFIKRQLVETRQITKHVAQILDSRMNTKYDENDKLIREVKVITLKSKLVSDFRKDFQFYKVREINNYHHAHDAYLNAVVGTALIKKYPKLESEFVYGDYKVYDVRKMIAKSEQEITAHAEIMALRQGGLVMQNYRLIDATLYVTFEPCVMCAGAMIHSRIGRVVFGVRNAKTGAAGSLMDVLHYPGMNHRVEITEGILADECAALLCYFFRMPRQVFNAQKKAQSSTDGSSGSETPGTSESATPESSGSEVEFSHEYWMRHALTLAKRARDEREVPVGAVLVLNNRVIGEGWNRAIGLHDPGKATAKYFFYSNIMNFFKTEITLANGEIRKRPLIETNGETGEIVWDKGRDFATVRKVLSMPQVNIVKKTEVQTGGFSKESILPKRNSDKLIARKKDWDPKKYGGFDSPTVAYSVLVVAKVEKGKSKKLKSVKELLGITIMERSSFEKNPIDFLEAKGYKEVKKDLIIKLPKYSLFELENGRKRMLASAGELQKGNELALPSKYVNFLYLASHYEKLKGSPEDNEQKQLFVEQHKHYLDEIIEQISEFSKRVILADANLDKVLSAYNKHRDKPIREQAENIIHLFTLTNLGAPAAFKYFDTTIDRKRYTSTKEVLDATLIHQSITGLYETRIDLSQLGGD

SEQ ID NO: 306 - protein, 1554 aa, synthetic construct
  REGION 1..1554: note = 130 TadA CP65ins 1041 polypeptide sequence
MDKKYSIGLAIGTNSVGWAVITDEYKVPSKKFKVLGNTDRHSIKKNLIGALLFDSGETAEATRLKRTARRRYTRRKNRICYLQEIFSNEMAKVDDSFFHRLEESFLVEEDKKHERHPIFGNIVDEVAYHEKYPTIYHLRKKLVDSTDKADLRLIYLALAHMIKFRGHFLIEGDLNPDNSDVDKLFIQLVQTYNQLFEENPINASGVDAKAILSARLSKSRRLENLIAQLPGEKKNGLFGNLIALSLGLTPNFKSNFDLAEDAKLQLSKDTYDDDLDNLLAQIGDQYADLFLAAKNLSDAILLSDILRVNTEITKAPLSASMIKRYDEHHQDLTLLKALVRQQLPEKYKEIFFDQSKNGYAGYIDGGASQEEFYKFIKPILEKMDGTEELLVKLNREDLLRKQRTFDNGSIPHQIHLGELHAILRRQEDFYPFLKDNREKIEKILTFRIPYYVGPLARGNSRFAWMTRKSEETITPWNFEEVVDKGASAQSFIERMTNFDKNLPNEKVLPKHSLLYEYFTVYNELTKVKYVTEGMRKPAFLSGEQKKAIVDLLFKTNRKVTVKQLKEDYFKKIECFDSVEISGVEDRFNASLGTYHDLLKIIKDKDFLDNEENEDILEDIVLTLTLFEDREMIEERLKTYAHLFDDKVMKQLKRRRYTGWGRLSRKLINGIRDKQSGKTILDFLKSDGFANRNFMQLIHDDSLTFKEDIQKAQVSGQGDSLHEHIANLAGSPAIKKGILQTVKVVDELVKVMGRHKPENIVIEMARENQTTQKGQKNSRERMKRIEEGIKELGSQILKEHPVENTQLQNEKLYLYYLQNGRDMYVDQELDINRLSDYDVDHIVPQSFLKDDSIDNKVLTRSDKNRGKSDNVPSEEVVKKMKNYWRQLLNAKLITQRKFDNLTKAERGGLSELDKAGFIKRQLVETRQITKHVAQILDSRMNTKYDENDKLIREVKVITLKSKLVSDFRKDFQFYKVREINNYHHAHDAYLNAVVGTALIKKYPKLESEFVYGDYKVYDVRKMIAKSEQEIGKATAKYFFYSTAHAEIMALRQGGLVMQNYRLIDATLYVTFEPCVMCAGAMIHSRIGRVVFGVRNAKTGAAGSLMDVLHYPGMNHRVEITEGILADECAALLCYFFRMPRQVFNAQKKAQSSTDGSSGSETPGTSESATPESSGSEVEFSHEYWMRHALTLAKRARDEREVPVGAVLVLNNRVIGEGWNRAIGLHDPNIMNFFKTEITLANGEIRKRPLIETNGETGEIVWDKGRDFATVRKVLSMPQVNIVKKTEVQTGGFSKESILPKRNSDKLIARKKDWDPKKYGGFDSPTVAYSVLVVAKVEKGKSKKLKSVKELLGITIMERSSFEKNPIDFLEAKGYKEVKKDLIIKLPKYSLFELENGRKRMLASAGELQKGNELALPSKYVNFLYLASHYEKLKGSPEDNEQKQLFVEQHKHYLDEIIEQISEFSKRVILADANLDKVLSAYNKHRDKPIREQAENIIHLFTLTNLGAPAAFKYFDTTIDRKRYTSTKEVLDATLIHQSITGLYETRIDLSQLGGD

SEQ ID NO: 307 - protein, 1554 aa, synthetic construct
  REGION 1..1554: note = 131 TadA CP65ins 1054 polypeptide sequence
MDKKYSIGLAIGTNSVGWAVITDEYKVPSKKFKVLGNTDRHSIKKNLIGALLFDSGETAEATRLKRTARRRYTRRKNRICYLQEIFSNEMAKVDDSFFHRLEESFLVEEDKKHERHPIFGNIVDEVAYHEKYPTIYHLRKKLVDSTDKADLRLIYLALAHMIKFRGHFLIEGDLNPDNSDVDKLFIQLVQTYNQLFEENPINASGVDAKAILSARLSKSRRLENLIAQLPGEKKNGLFGNLIALSLGLTPNFKSNFDLAEDAKLQLSKDTYDDDLDNLLAQIGDQYADLFLAAKNLSDAILLSDILRVNTEITKAPLSASMIKRYDEHHQDLTLLKALVRQQLPEKYKEIFFDQSKNGYAGYIDGGASQEEFYKFIKPILEKMDGTEELLVKLNREDLLRKQRTFDNGSIPHQIHLGELHAILRRQEDFYPFLKDNREKIEKILTFRIPYYVGPLARGNSRFAWMTRKSEETITPWNFEEVVDKGASAQSFIERMTNFDKNLPNEKVLPKHSLLYEYFTVYNELTKVKYVTEGMRKPAFLSGEQKKAIVDLLFKTNRKVTVKQLKEDYFKKIECFDSVEISGVEDRFNASLGTYHDLLKIIKDKDFLDNEENEDILEDIVLTLTLFEDREMIEERLKTYAHLFDDKVMKQLKRRRYTGWGRLSRKLINGIRDKQSGKTILDFLKSDGFANRNFMQLIHDDSLTFKEDIQKAQVSGQGDSLHEHIANLAGSPAIKKGILQTVKVVDELVKVMGRHKPENIVIEMARENQTTQKGQKNSRERMKRIEEGIKELGSQILKEHPVENTQLQNEKLYLYYLQNGRDMYVDQELDINRLSDYDVDHIVPQSFLKDDSIDNKVLTRSDKNRGKSDNVPSEEVVKKMKNYWRQLLNAKLITQRKFDNLTKAERGGLSELDKAGFIKRQLVETRQITKHVAQILDSRMNTKYDENDKLIREVKVITLKSKLVSDFRKDFQFYKVREINNYHHAHDAYLNAVVGTALIKKYPKLESEFVYGDYKVYDVRKMIAKSEQEIGKATAKYFFYSNIMNFFKTEITLANTAHAEIMALRQGGLVMQNYRLIDATLYVTFEPCVMCAGAMIHSRIGRVVFGVRNAKTGAAGSLMDVLHYPGMNHRVEITEGILADECAALLCYFFRMPRQVFNAQKKAQSSTDGSSGSETPGTSESATPESSGSEVEFSHEYWMRHALTLAKRARDEREVPVGAVLVLNNRVIGEGWNRAIGLHDPGEIRKRPLIETNGETGEIVWDKGRDFATVRKVLSMPQVNIVKKTEVQTGGFSKESILPKRNSDKLIARKKDWDPKKYGGFDSPTVAYSVLVVAKVEKGKSKKLKSVKELLGITIMERSSFEKNPIDFLEAKGYKEVKKDLIIKLPKYSLFELENGRKRMLASAGELQKGNELALPSKYVNFLYLASHYEKLKGSPEDNEQKQLFVEQHKHYLDEIIEQISEFSKRVILADANLDKVLSAYNKHRDKPIREQAENIIHLFTLTNLGAPAAFKYFDTTIDRKRYTSTKEVLDATLIHQSITGLYETRIDLSQLGGD

SEQ ID NO: 308 - protein, 1554 aa, synthetic construct
  REGION 1..1554: note = 132 TadA CP65ins 1246 polypeptide sequence
MDKKYSIGLAIGTNSVGWAVITDEYKVPSKKFKVLGNTDRHSIKKNLIGALLFDSGETAEATRLKRTARRRYTRRKNRICYLQEIFSNEMAKVDDSFFHRLEESFLVEEDKKHERHPIFGNIVDEVAYHEKYPTIYHLRKKLVDSTDKADLRLIYLALAHMIKFRGHFLIEGDLNPDNSDVDKLFIQLVQTYNQLFEENPINASGVDAKAILSARLSKSRRLENLIAQLPGEKKNGLFGNLIALSLGLTPNFKSNFDLAEDAKLQLSKDTYDDDLDNLLAQIGDQYADLFLAAKNLSDAILLSDILRVNTEITKAPLSASMIKRYDEHHQDLTLLKALVRQQLPEKYKEIFFDQSKNGYAGYIDGGASQEEFYKFIKPILEKMDGTEELLVKLNREDLLRKQRTFDNGSIPHQIHLGELHAILRRQEDFYPFLKDNREKIEKILTFRIPYYVGPLARGNSRFAWMTRKSEETITPWNFEEVVDKGASAQSFIERMTNFDKNLPNEKVLPKHSLLYEYFTVYNELTKVKYVTEGMRKPAFLSGEQKKAIVDLLFKTNRKVTVKQLKEDYFKKIECFDSVEISGVEDRFNASLGTYHDLLKIIKDKDFLDNEENEDILEDIVLTLTLFEDREMIEERLKTYAHLFDDKVMKQLKRRRYTGWGRLSRKLINGIRDKQSGKTILDFLKSDGFANRNFMQLIHDDSLTFKEDIQKAQVSGQGDSLHEHIANLAGSPAIKKGILQTVKVVDELVKVMGRHKPENIVIEMARENQTTQKGQKNSRERMKRIEEGIKELGSQILKEHPVENTQLQNEKLYLYYLQNGRDMYVDQELDINRLSDYDVDHIVPQSFLKDDSIDNKVLTRSDKNRGKSDNVPSEEVVKKMKNYWRQLLNAKLITQRKFDNLTKAERGGLSELDKAGFIKRQLVETRQITKHVAQILDSRMNTKYDENDKLIREVKVITLKSKLVSDFRKDFQFYKVREINNYHHAHDAYLNAVVGTALIKKYPKLESEFVYGDYKVYDVRKMIAKSEQEIGKATAKYFFYSNIMNFFKTEITLANGEIRKRPLIETNGETGEIVWDKGRDFATVRKVLSMPQVNIVKKTEVQTGGFSKESILPKRNSDKLIARKKDWDPKKYGGFDSPTVAYSVLVVAKVEKGKSKKLKSVKELLGITIMERSSFEKNPIDFLEAKGYKEVKKDLIIKLPKYSLFELENGRKRMLASAGELQKGNELALPSKYVNFLYLASHYEKLKGTAHAEIMALRQGGLVMQNYRLIDATLYVTFEPCVMCAGAMIHSRIGRVVFGVRNAKTGAAGSLMDVLHYPGMNHRVEITEGILADECAALLCYFFRMPRQVFNAQKKAQSSTDGSSGSETPGTSESATPESSGSEVEFSHEYWMRHALTLAKRARDEREVPVGAVLVLNNRVIGEGWNRAIGLHDPSPEDNEQKQLFVEQHKHYLDEIIEQISEFSKRVILADANLDKVLSAYNKHRDKPIREQAENIIHLFTLTNLGAPAAFKYFDTTIDRKRYTSTKEVLDATLIHQSITGLYETRIDLSQLGGD

SEQ ID NO: 309 - protein, 160 aa, Staphylococcus aureus
  REGION 1..160: note = MISC_FEATURE - TadA polypeptide sequence
MGSHMTNDIYFMTLAIEEAKKAAQLGEVPIGAIITKDDEVIARAHNLRETLQQPTAHAEHIAIERAAKVLGSWRLEGCTLYVTLEPCVMCAGTIVMSRIPRVVYGADDPKGGCSGSLMNLLQQSNFNHRAIVDKGVLKEACSTLLTTFFKNLRANKKSTN

SEQ ID NO: 310 - protein, 161 aa, Bacillus subtilis
  REGION 1..161: note = MISC_FEATURE - TadA polypeptide sequence
MTQDELYMKEAIKEAKKAEEKGEVPIGAVLVINGEIIARAHNLRETEQRSIAHAEMLVIDEACKALGTWRLEGATLYVTLEPCPMCAGAVVLSRVEKVVFGAFDPKGGCSGTLMNLLQEERFNHQAEVVSGVLEEECGGMLSAFFRELRKKKKAARKNLSE

SEQ ID NO: 311 - protein, 183 aa, Salmonella enterica
  REGION 1..183: note = MISC_FEATURE - TadA polypeptide sequence
  source 1..183: note = serovar Typhimurium
MPPAFITGVTSLSDVELDHEYWMRHALTLAKRAWDEREVPVGAVLVHNHRVIGEGWNRPIGRHDPTAHAEIMALRQGGLVLQNYRLLDTTLYVTLEPCVMCAGAMVHSRIGRVVFGARDAKTGAAGSLIDVLHHPGMNHRVEIIEGVLRDECATLLSDFFRMRRQEIKALKKADRAEGAGPAV

SEQ ID NO: 312 - protein, 164 aa, Shewanella putrefaciens
  REGION 1..164: note = MISC_FEATURE - TadA polypeptide sequence
MDEYWMQVAMQMAEKAEAAGEVPVGAVLVKDGQQIATGYNLSISQHDPTAHAEILCLRSAGKKLENYRLLDATLYITLEPCAMCAGAMVHSRIARVVYGARDEKTGAAGTVVNLLQHPAFNHQVEVTSGVLAEACSAQLSRFFKRRRDEKKALKLAQRAQQGIE

SEQ ID NO: 313 - protein, 173 aa, Haemophilus influenzae
  REGION 1..173: note = MISC_FEATURE - TadA polypeptide sequence
MDAAKVRSEFDEKMMRYALELADKAEALGEIPVGAVLVDDARNIIGEGWNLSIVQSDPTAHAEIIALRNGAKNIQNYRLLNSTLYVTLEPCTMCAGAILHSRIKRLVFGASDYKTGAIGSRFHFFDDYKMNHTLEITSGVLAEECSQKLSTFFQKRREEKKIEKALLKSLSDK

SEQ ID NO: 314 - protein, 161 aa, Caulobacter crescentus
  REGION 1..161: note = MISC_FEATURE - TadA polypeptide sequence
MRTDESEDQDHRMMRLALDAARAAAEAGETPVGAVILDPSTGEVIATAGNGPIAAHDPTAHAEIAAMRAAAAKLGNYRLTDLTLVVTLEPCAMCAGAISHARIGRVVFGADDPKGGAVVHGPKFFAQPTCHWRPEVTGGVLADESADLLRGFFRARRKAKI

SEQ ID NO: 315 - protein, 179 aa, Geobacter sulfurreducens
  REGION 1..179: note = MISC_FEATURE - TadA polypeptide sequence
MSSLKKTPIRDDAYWMGKAIREAAKAAARDEVPIGAVIVRDGAVIGRGHNLREGSNDPSAHAEMIAIRQAARRSANWRLTGATLYVTLEPCLMCMGAIILARLERVVFGCYDPKGGAAGSLYDLSADPRLNHQVRLSPGVCQEECGTMLSDFFRDLRRRKKAKATPALFIDERKVPPEP

SEQ ID NO: 316 - protein, 167 aa, synthetic construct
  REGION 1..167: note = TadA*8 polypeptide sequence
MSEVEFSHEYWMRHALTLAKRARDEREVPVGAVLVLNNRVIGEGWNRAIGLHDPTAHAEIMALRQGGLVMQNYRLIDATLYVTFEPCVMCAGAMIHSRIGRVVFGVRNAKTGAAGSLMDVLHYPGMNHRVEITEGILADECAALLCTFFRMPRQVFNAQKKAQSSTD

SEQ ID NO: 317 - RNA, 80 nt, synthetic construct
  misc_feature 1..80: note = gRNA scaffold polynucleotide sequence
  source 1..80: mol_type = other RNA
gttttagagctagaaatagcaagttaaaataaggctagtccgttatcaacttgaaaaagtggcaccgagtcggtgctttt

SEQ ID NO: 318 - RNA, 125 nt, synthetic construct
  misc_feature 1..125: note = gRNA scaffold polynucleotide sequence
  source 1..125: mol_type = other RNA
gtttttgtactctcaagatttaagtaactgtacaacgaaacttacacagttacttaaatcttgcagaagctacaaagataaggcttcatgccgaaatcaacaccctgtcattttatggcagggtg

SEQ ID NO: 319 - RNA, 76 nt, Streptococcus pyogenes
  misc_feature 1..76: note = S. pyogenes gRNA scaffold oligonucleotide sequence
  source 1..76: mol_type = other RNA
gttttagagctagaaatagcaagttaaaataaggctagtccgttatcaacttgaaaaagtggcaccgagtcggtgc

SEQ ID NO: 320 - RNA, 84 nt, Staphylococcus aureus
  misc_feature 1..84: note = S. aureus gRNA scaffold oligonucleotide sequence
  source 1..84: mol_type = other RNA
gttttagtactctgtaatgaaaattacagaatctactaaaacaaggcaaaatgccgtgtttatctcgtcaacttgttggcgaga

SEQ ID NO: 321 - RNA, 97 nt, Bacillus hisashii
  misc_feature 1..97: note = BhCas12b gRNA scaffold oligonucleotide sequence
  source 1..97: mol_type = other RNA
gttctgtcttttggtcaggacaaccgtctagctataagtgctgcagggtgtgagaaactcctattgctggacgatgtctcttacgaggcattagcac

SEQ ID NO: 322 - RNA, 88 nt, Bacillus sp.
  misc_feature 1..88: note = BvCas12b gRNA scaffold oligonucleotide sequence
  source 1..88: mol_type = other RNA
gacctatagggtcaatgaatctgtgcgtgtgccataagtaattaaaaattacccaccacaggagcacctgaaaacaggtgcttggcac

SEQ ID NO: 323 - RNA, 80 nt, synthetic construct
  misc_feature 1..80: note = gRNA scaffold nucleotide sequence; oligonucleotide sequence
  modified_base 78..80: mod_base = um
  misc_feature 78..80: note = In embodiments, a nucleotide(s) is linked to the preceding 5' nucleotide by a 3' phosphorothioate internucleotide linkage
  source 1..80: mol_type = other RNA
gttttagagctagaaatagcaagttaaaataaggctagtccgttatcaacttgaaaaagtgggaccgagtcggtgctttt

SEQ ID NO: 324 - RNA, 80 nt, synthetic construct; identical to SEQ ID NO: 317
  misc_feature 1..80: note = gRNA scaffold nucleotide sequence
  misc_feature 78..80: note = In embodiments, a nucleotide(s) is linked to the preceding 5' nucleotide by a 3' phosphorothioate internucleotide linkage
  modified_base 78..80: mod_base = um
  source 1..80: mol_type = other RNA

SEQ ID NO: 325 - RNA, 117 nt, Bacillus hisashii
  misc_feature 1..117: note = BhCas12b gRNA scaffold + guide sequence; oligonucleotide sequence
  misc_feature 1..97: note = BhCas12b sgRNA scaffold
  source 1..117: mol_type = other RNA
gttctgtcttttggtcaggacaaccgtctagctataagtgctgcagggtgtgagaaactcctattgctggacgatgtctcttacgaggcattagcacnnnnnnnnnnnnnnnnnnnn

SEQ ID NO: 326 - RNA, 108 nt, Bacillus sp.
  misc_feature 1..108: note = BvCas12b gRNA scaffold + guide sequence; oligonucleotide sequence
  misc_feature 1..88: note = BvCas12b gRNA scaffold
  source 1..108: mol_type = other RNA
gacctatagggtcaatgaatctgtgcgtgtgccataagtaattaaaaattacccaccacaggagcacctgaaaacaggtgcttggcacnnnnnnnnnnnnnnnnnnnn

SEQ ID NO: 327 - RNA, 119 nt, Alicyclobacillus acidiphilus
  misc_feature 1..119: note = AaCas12b gRNA scaffold + guide sequence; oligonucleotide sequence
  misc_feature 1..99: note = AaCas12b gRNA scaffold
  source 1..119: mol_type = other RNA
gtctaaaggacagaatttttcaacgggtgtgccaatggccactttccaggtggcaaagcccgttgaacttctcaaaaagaacgatctgagaagtggcacnnnnnnnnnnnnnnnnnnnn

SEQ ID NO: 328 - protein, 29 aa, synthetic construct
  REGION 1..29: note = synthetic polypeptide sequence
PKKKRKVEGADKRTADGSEFESPKKKRKV

SEQ ID NO: 329 - protein, 23 aa, synthetic construct
  REGION 1..23: note = synthetic peptide sequence
RKSGKIAAIVVKRPRKPKKKRKV

SEQ ID NO: 330 - protein, 8 aa, synthetic construct
  REGION 1..8: note = synthetic peptide sequence
SGGSSGGS

SEQ ID NO: 331 - protein, 1609 aa, synthetic construct
  REGION 1..1609: note = pNMG-B335ABE8.1_Y147T_CP5_NGC PAM_monomer polypeptide sequence
MSEVEFSHEYWMRHALTLAKRARDEREVPVGAVLVLNNRVIGEGWNRAIGLHDPTAHAEIMALRQGGLVMQNYRLIDATLYVTFEPCVMCAGAMIHSRIGRVVFGVRNAKTGAAGSLMDVLHYPGMNHRVEITEGILADECAALLCTFFRMPRQVFNAQKKAQSSTDSGGSSGGSSGSETPGTSESATPESSGGSSGGSEIGKATAKYFFYSNIMNFFKTEITLANGEIRKRPLIETNGETGEIVWDKGRDFATVRKVLSMPQVNIVKKTEVQTGGFSKESILPKRNSDKLIARKKDWDPKKYGGFMQPTVAYSVLVVAKVEKGKSKKLKSVKELLGITIMERSSFEKNPIDFLEAKGYKEVKKDLIIKLPKYSLFELENGRKRMLASAKFLQKGNELALPSKYVNFLYLASHYEKLKGSPEDNEQKQLFVEQHKHYLDEIIEQISEFSKRVILADANLDKVLSAYNKHRDKPIREQAENIIHLFTLTNLGAPRAFKYFDTTIARKEYRSTKEVLDATLIHQSITGLYETRIDLSQLGGDGGSGGSGGSGGSGGSGGSGGMDKKYSIGLAIGTNSVGWAVITDEYKVPSKKFKVLGNTDRHSIKKNLIGALLFDSGETAEATRLKRTARRRYTRRKNRICYLQEIFSNEMAKVDDSFFHRLEESFLVEEDKKHERHPIFGNIVDEVAYHEKYPTIYHLRKKLVDSTDKADLRLIYLALAHMIKFRGHFLIEGDLNPDNSDVDKLFIQLVQTYNQLFEENPINASGVDAKAILSARLSKSRRLENLIAQLPGEKKNGLFGNLIALSLGLTPNFKSNFDLAEDAKLQLSKDTYDDDLDNLLAQIGDQYADLFLAAKNLSDAILLSDILRVNTEITKAPLSASMIKRYDEHHQDLTLLKALVRQQLPEKYKEIFFDQSKNGYAGYIDGGASQEEFYKFIKPILEKMDGTEELLVKLNREDLLRKQRTFDNGSIPHQIHLGELHAILRRQEDFYPFLKDNREKIEKILTFRIPYYVGPLARGNSRFAWMTRKSEETITPWNFEEVVDKGASAQSFIERMTNFDKNLPNEKVLPKHSLLYEYFTVYNELTKVKYVTEGMRKPAFLSGEQKKAIVDLLFKTNRKVTVKQLKEDYFKKIECFDSVEISGVEDRFNASLGTYHDLLKIIKDKDFLDNEENEDILEDIVLTLTLFEDREMIEERLKTYAHLFDDKVMKQLKRRRYTGWGRLSRKLINGIRDKQSGKTILDFLKSDGFANRNFMQLIHDDSLTFKEDIQKAQVSGQGDSLHEHIANLAGSPAIKKGILQTVKVVDELVKVMGRHKPENIVIEMARENQTTQKGQKNSRERMKRIEEGIKELGSQILKEHPVENTQLQNEKLYLYYLQNGRDMYVDQELDINRLSDYDVDHIVPQSFLKDDSIDNKVLTRSDKNRGKSDNVPSEEVVKKMKNYWRQLLNAKLITQRKFDNLTKAERGGLSELDKAGFIKRQLVETRQITKHVAQILDSRMNTKYDENDKLIREVKVITLKSKLVSDFRKDFQFYKVREINNYHHAHDAYLNAVVGTALIKKYPKLESEFVYGDYKVYDVRKMIAKSEQEGADKRTADGSEFESPKKKRKV

SEQ ID NO: 332 - protein, 1807 aa, synthetic construct
  REGION 1..1807: note = pNMG-357_ABE8.14 with NGC PAMCP5 polypeptide sequence
  REGION 1..174: note = MISC_FEATURE - Adenosine deaminase sequence
  REGION 175..198: note = MISC_FEATURE - Linker sequence
  REGION 199..365: note = MISC_FEATURE - Adenosine deaminase sequence
  REGION 366..397: note = MISC_FEATURE - Linker sequence
  REGION 398..738: note = MISC_FEATURE - Sequence derived from Cas9
  REGION 739..759: note = MISC_FEATURE - Linker sequence
  REGION 760..1785: note = MISC_FEATURE - Sequence derived from Cas9
  REGION 1786..1807: note = MISC_FEATURE - Bipartite nuclear localization sequence
MSEVEFSHEYWMRHALTLAKRAWDEREVPVGAVLVHNNRVIGEGWNRPIGRHDPTAHAEIMALRQGGLVMQNYRLIDATLYVTLEPCVMCAGAMIHSRIGRVVFGARDAKTGAAGSLMDVLHHPGMNHRVEITEGILADECAALLSDFFRMRRQEIKAQKKAQSSTDGGSSGGSSGSETPGTSESATPESSGGSSGGSMSEVEFSHEYWMRHALTLAKRARDEREVPVGAVLVLNNRVIGEGWNRAIGLHDPTAHAEIMALRQGGLVMQNYRLIDATLYVTFEPCVMCAGAMIHSRIGRVVFGVRNAKTGAAGSLMDVLHYPGMNHRVEITEGILADECAALLCTFFRMPRQVFNAQKKAQSSTDSGGSSGGSSGSETPGTSESATPESSGGSSGGSEIGKATAKYFFYSNIMNFFKTEITLANGEIRKRPLIETNGETGEIVWDKGRDFATVRKVLSMPQVNIVKKTEVQTGGFSKESILPKRNSDKLIARKKDWDPKKYGGFMQPTVAYSVLVVAKVEKGKSKKLKSVKELLGITIMERSSFEKNPIDFLEAKGYKEVKKDLIIKLPKYSLFELENGRKRMLASAKFLQKGNELALPSKYVNFLYLASHYEKLKGSPEDNEQKQLFVEQHKHYLDEIIEQISEFSKRVILADANLDKVLSAYNKHRDKPIREQAENIIHLFTLTNLGAPRAFKYFDTTIARKEYRSTKEVLDATLIHQSITGLYETRIDLSQLGGDGGSGGSGGSGGSGGSGGSGGMDKKYSIGLAIGTNSVGWAVITDEYKVPSKKFKVLGNTDRHSIKKNLIGALLFDSGETAEATRLKRTARRRYTRRKNRICYLQEIFSNEMAKVDDSFFHRLEESFLVEEDKKHERHPIFGNIVDEVAYHEKYPTIYHLRKKLVDSTDKADLRLIYLALAHMIKFRGHFLIEGDLNPDNSDVDKLFIQLVQTYNQLFEENPINASGVDAKAILSARLSKSRRLENLIAQLPGEKKNGLFGNLIALSLGLTPNFKSNFDLAEDAKLQLSKDTYDDDLDNLLAQIGDQYADLFLAAKNLSDAILLSDILRVNTEITKAPLSASMIKRYDEHHQDLTLLKALVRQQLPEKYKEIFFDQSKNGYAGYIDGGASQEEFYKFIKPILEKMDGTEELLVKLNREDLLRKQRTFDNGSIPHQIHLGELHAILRRQEDFYPFLKDNREKIEKILTFRIPYYVGPLARGNSRFAWMTRKSEETITPWNFEEVVDKGASAQSFIERMTNFDKNLPNEKVLPKHSLLYEYFTVYNELTKVKYVTEGMRKPAFLSGEQKKAIVDLLFKTNRKVTVKQLKEDYFKKIECFDSVEISGVEDRFNASLGTYHDLLKIIKDKDFLDNEENEDILEDIVLTLTLFEDREMIEERLKTYAHLFDDKVMKQLKRRRYTGWGRLSRKLINGIRDKQSGKTILDFLKSDGFANRNFMQLIHDDSLTFKEDIQKAQVSGQGDSLHEHIANLAGSPAIKKGILQTVKVVDELVKVMGRHKPENIVIEMARENQTTQKGQKNSRERMKRIEEGIKELGSQILKEHPVENTQLQNEKLYLYYLQNGRDMYVDQELDINRLSDYDVDHIVPQSFLKDDSIDNKVLTRSDKNRGKSDNVPSEEVVKKMKNYWRQLLNAKLITQRKFDNLTKAERGGLSELDKAGFIKRQLVETRQITKHVAQILDSRMNTKYDENDKLIREVKVITLKSKLVSDFRKDFQFYKVREINNYHHAHDAYLNAVVGTALIKKYPKLESEFVYGDYKVYDVRKMIAKSEQEGADKRTADGSEFESPKKKRKV

SEQ ID NO: 333 - protein, 1588 aa, synthetic construct
  REGION 1..1588: note = ABE8.8-m polypeptide sequence
  REGION 1..167: note = MISC_FEATURE - Adenosine deaminase sequence
  REGION 168..199: note = MISC_FEATURE - Linker sequence
  REGION 200..1566: note = MISC_FEATURE - Sequence derived from Cas9
  REGION 1567..1588: note = MISC_FEATURE - Bipartite nuclear localization sequence
MSEVEFSHEYWMRHALTLAKRARDEREVPVGAVLVLNNRVIGEGWNRAIGLHDPTAHAEIMALRQGGLVMQNYRLIDATLYVTFEPCVMCAGAMIHSRIGRVVFGVRNAKTGAAGSLMDVLHHPGMNHRVEITEGILADECAALLCRFFRMPRRVFNAQKKAQSSTDSGGSSGGSSGSETPGTSESATPESSGGSSGGSDKKYSIGLAIGTNSVGWAVITDEYKVPSKKFKVLGNTDRHSIKKNLIGALLFDSGETAEATRLKRTARRRYTRRKNRICYLQEIFSNEMAKVDDSFFHRLEESFLVEEDKKHERHPIFGNIVDEVAYHEKYPTIYHLRKKLVDSTDKADLRLIYLALAHMIKFRGHFLIEGDLNPDNSDVDKLFIQLVQTYNQLFEENPINASGVDAKAILSARLSKSRRLENLIAQLPGEKKNGLFGNLIALSLGLTPNFKSNFDLAEDAKLQLSKDTYDDDLDNLLAQIGDQYADLFLAAKNLSDAILLSDILRVNTEITKAPLSASMIKRYDEHHQDLTLLKALVRQQLPEKYKEIFFDQSKNGYAGYIDGGASQEEFYKFIKPILEKMDGTEELLVKLNREDLLRKQRTFDNGSIPHQIHLGELHAILRRQEDFYPFLKDNREKIEKILTFRIPYYVGPLARGNSRFAWMTRKSEETITPWNFEEVVDKGASAQSFIERMTNFDKNLPNEKVLPKHSLLYEYFTVYNELTKVKYVTEGMRKPAFLSGEQKKAIVDLLFKTNRKVTVKQLKEDYFKKIECFDSVEISGVEDRFNASLGTYHDLLKIIKDKDFLDNEENEDILEDIVLTLTLFEDREMIEERLKTYAHLFDDKVMKQLKRRRYTGWGRLSRKLINGIRDKQSGKTILDFLKSDGFANRNFMQLIHDDSLTFKEDIQKAQVSGQGDSLHEHIANLAGSPAIKKGILQTVKVVDELVKVMGRHKPENIVIEMARENQTTQKGQKNSRERMKRIEEGIKELGSQILKEHPVENTQLQNEKLYLYYLQNGRDMYVDQELDINRLSDYDVDHIVPQSFLKDDSIDNKVLTRSDKNRGKSDNVPSEEVVKKMKNYWRQLLNAKLITQRKFDNLTKAERGGLSELDKAGFIKRQLVETRQITKHVAQILDSRMNTKYDENDKLIREVKVITLKSKLVSDFRKDFQFYKVREINNYHHAHDAYLNAVVGTALIKKYPKLESEFVYGDYKVYDVRKMIAKSEQEIGKATAKYFFYSNIMNFFKTEITLANGEIRKRPLIETNGETGEIVWDKGRDFATVRKVLSMPQVNIVKKTEVQTGGFSKESILPKRNSDKLIARKKDWDPKKYGGFDSPTVAYSVLVVAKVEKGKSKKLKSVKELLGITIMERSSFEKNPIDFLEAKGYKEVKKDLIIKLPKYSLFELENGRKRMLASAGELQKGNELALPSKYVNFLYLASHYEKLKGSPEDNEQKQLFVEQHKHYLDEIIEQISEFSKRVILADANLDKVLSAYNKHRDKPIREQAENIIHLFTLTNLGAPAAFKYFDTTIDRKRYTSTKEVLDATLIHQSITGLYETRIDLSQLGGDEGADKRTADGSEFESPKKKRKV

SEQ ID NO: 334 - protein, 1786 aa, synthetic construct
  REGION 1..1786: note = ABE8.8-d polypeptide sequence
  REGION 1..167: note = MISC_FEATURE - Adenosine deaminase sequence
  REGION 168..199: note = MISC_FEATURE - Linker sequence
  REGION 200..365: note = MISC_FEATURE - Adenosine deaminase sequence
  REGION 366..397: note = MISC_FEATURE - Linker sequence
  REGION 398..1764: note = MISC_FEATURE - Sequence derived from Cas9
  REGION 1765..1786: note = MISC_FEATURE - Bipartite nuclear localization sequence
MSEVEFSHEYWMRHALTLAKRAWDEREVPVGAVLVHNNRVIGEGWNRPIGRHDPTAHAEIMALRQGGLVMQNYRLIDATLYVTLEPCVMCAGAMIHSRIGRVVFGARDAKTGAAGSLMDVLHHPGMNHRVEITEGILADECAALLSDFFRMRRQEIKAQKKAQSSTDSGGSSGGSSGSETPGTSESATPESSGGSSGGSSEVEFSHEYWMRHALTLAKRARDEREVPVGAVLVLNNRVIGEGWNRAIGLHDPTAHAEIMALRQGGLVMQNYRLIDATLYVTFEPCVMCAGAMIHSRIGRVVFGVRNAKTGAAGSLMDVLHHPGMNHRVEITEGILADECAALLCRFFRMPRRVFNAQKKAQSSTDSGGSSGGSSGSETPGTSESATPESSGGSSGGSDKKYSIGLAIGTNSVGWAVITDEYKVPSKKFKVLGNTDRHSIKKNLIGALLFDSGETAEATRLKRTARRRYTRRKNRICYLQEIFSNEMAKVDDSFFHRLEESFLVEEDKKHERHPIFGNIVDEVAYHEKYPTIYHLRKKLVDSTDKADLRLIYLALAHMIKFRGHFLIEGDLNPDNSDVDKLFIQLVQTYNQLFEENPINASGVDAKAILSARLSKSRRLENLIAQLPGEKKNGLFGNLIALSLGLTPNFKSNFDLAEDAKLQLSKDTYDDDLDNLLAQIGDQYADLFLAAKNLSDAILLSDILRVNTEITKAPLSASMIKRYDEHHQDLTLLKALVRQQLPEKYKEIFFDQSKNGYAGYIDGGASQEEFYKFIKPILEKMDGTEELLVKLNREDLLRKQRTFDNGSIPHQIHLGELHAILRRQEDFYPFLKDNREKIEKILTFRIPYYVGPLARGNSRFAWMTRKSEETITPWNFEEVVDKGASAQSFIERMTNFDKNLPNEKVLPKHSLLYEYFTVYNELTKVKYVTEGMRKPAFLSGEQKKAIVDLLFKTNRKVTVKQLKEDYFKKIECFDSVEISGVEDRFNASLGTYHDLLKIIKDKDFLDNEENEDILEDIVLTLTLFEDREMIEERLKTYAHLFDDKVMKQLKRRRYTGWGRLSRKLINGIRDKQSGKTILDFLKSDGFANRNFMQLIHDDSLTFKEDIQKAQVSGQGDSLHEHIANLAGSPAIKKGILQTVKVVDELVKVMGRHKPENIVIEMARENQTTQKGQKNSRERMKRIEEGIKELGSQILKEHPVENTQLQNEKLYLYYLQNGRDMYVDQELDINRLSDYDVDHIVPQSFLKDDSIDNKVLTRSDKNRGKSDNVPSEEVVKKMKNYWRQLLNAKLITQRKFDNLTKAERGGLSELDKAGFIKRQLVETRQITKHVAQILDSRMNTKYDENDKLIREVKVITLKSKLVSDFRKDFQFYKVREINNYHHAHDAYLNAVVGTALIKKYPKLESEFVYGDYKVYDVRKMIAKSEQEIGKATAKYFFYSNIMNFFKTEITLANGEIRKRPLIETNGETGEIVWDKGRDFATVRKVLSMPQVNIVKKTEVQTGGFSKESILPKRNSDKLIARKKDWDPKKYGGFDSPTVAYSVLVVAKVEKGKSKKLKSVKELLGITIMERSSFEKNPIDFLEAKGYKEVKKDLIIKLPKYSLFELENGRKRMLASAGELQKGNELALPSKYVNFLYLASHYEKLKGSPEDNEQKQLFVEQHKHYLDEIIEQISEFSKRVILADANLDKVLSAYNKHRDKPIREQAENIIHLFTLTNLGAPAAFKYFDTTIDRKRYTSTKEVLDATLIHQSITGLYETRIDLSQLGGDEGADKRTADGSEFESPKKKRKV

SEQ ID NO: 335 - protein, 1588 aa, synthetic construct
  REGION 1..1588: note = ABE8.13-m polypeptide sequence
  REGION 1..167: note = MISC_FEATURE - Adenosine deaminase sequence
  REGION 168..199: note = MISC_FEATURE - Linker sequence
  REGION 200..1566: note = MISC_FEATURE - Sequence derived from Cas9
  REGION 1567..1588: note = MISC_FEATURE - Bipartite nuclear localization sequence
MSEVEFSHEYWMRHALTLAKRARDEREVPVGAVLVLNNRVIGEGWNRAIGLHDPTAHAEIMALRQGGLVMQNYRLYDATLYVTFEPCVMCAGAMIHSRIGRVVFGVRNAKTGAAGSLMDVLHHPGMNHRVEITEGILADECAALLCRFFRMPRRVFNAQKKAQSSTDSGGSSGGSSGSETPGTSESATPESSGGSSGGSDKKYSIGLAIGTNSVGWAVITDEYKVPSKKFKVLGNTDRHSIKKNLIGALLFDSGETAEATRLKRTARRRYTRRKNRICYLQEIFSNEMAKVDDSFFHRLEESFLVEEDKKHERHPIFGNIVDEVAYHEKYPTIYHLRKKLVDSTDKADLRLIYLALAHMIKFRGHFLIEGDLNPDNSDVDKLFIQLVQTYNQLFEENPINASGVDAKAILSARLSKSRRLENLIAQLPGEKKNGLFGNLIALSLGLTPNFKSNFDLAEDAKLQLSKDTYDDDLDNLLAQIGDQYADLFLAAKNLSDAILLSDILRVNTEITKAPLSASMIKRYDEHHQDLTLLKALVRQQLPEKYKEIFFDQSKNGYAGYIDGGASQEEFYKFIKPILEKMDGTEELLVKLNREDLLRKQRTFDNGSIPHQIHLGELHAILRRQEDFYPFLKDNREKIEKILTFRIPYYVGPLARGNSRFAWMTRKSEETITPWNFEEVVDKGASAQSFIERMTNFDKNLPNEKVLPKHSLLYEYFTVYNELTKVKYVTEGMRKPAFLSGEQKKAIVDLLFKTNRKVTVKQLKEDYFKKIECFDSVEISGVEDRFNASLGTYHDLLKIIKDKDFLDNEENEDILEDIVLTLTLFEDREMIEERLKTYAHLFDDKVMKQLKRRRYTGWGRLSRKLINGIRDKQSGKTILDFLKSDGFANRNFMQLIHDDSLTFKEDIQKAQVSGQGDSLHEHIANLAGSPAIKKGILQTVKVVDELVKVMGRHKPENIVIEMARENQTTQKGQKNSRERMKRIEEGIKELGSQILKEHPVENTQLQNEKLYLYYLQNGRDMYVDQELDINRLSDYDVDHIVPQSFLKDDSIDNKVLTRSDKNRGKSDNVPSEEVVKKMKNYWRQLLNAKLITQRKFDNLTKAERGGLSELDKAGFIKRQLVETRQITKHVAQILDSRMNTKYDENDKLIREVKVITLKSKLVSDFRKDFQFYKVREINNYHHAHDAYLNAVVGTALIKKYPKLESEFVYGDYKVYDVRKMIAKSEQEIGKATAKYFFYSNIMNFFKTEITLANGEIRKRPLIETNGETGEIVWDKGRDFATVRKVLSMPQVNIVKKTEVQTGGFSKESILPKRNSDKLIARKKDWDPKKYGGFDSPTVAYSVLVVAKVEKGKSKKLKSVKELLGITIMERSSFEKNPIDFLEAKGYKEVKKDLIIKLPKYSLFELENGRKRMLASAGELQKGNELALPSKYVNFLYLASHYEKLKGSPEDNEQKQLFVEQHKHYLDEIIEQISEFSKRVILADANLDKVLSAYNKHRDKPIREQAENIIHLFTLTNLGAPAAFKYFDTTIDRKRYTSTKEVLDATLIHQSITGLYETRIDLSQLGGDEGADKRTADGSEFESPKKKRKV

SEQ ID NO: 336 - protein, 1786 aa, synthetic construct
  REGION 1..1786: note = ABE8.13-d polypeptide sequence
  REGION 1..167: note = MISC_FEATURE - Adenosine deaminase sequence
  REGION 168..199: note = MISC_FEATURE - Linker sequence
  REGION 200..365: note = MISC_FEATURE - Adenosine deaminase sequence
  REGION 366..397: note = MISC_FEATURE - Linker sequence
  REGION 398..1764: note = MISC_FEATURE - Sequence derived from Cas9
  REGION 1765..1786: note = MISC_FEATURE - Bipartite nuclear localization sequence
MSEVEFSHEYWMRHALTLAKRAWDEREVPVGAVLVHNNRVIGEGWNRPIGRHDPTAHAEIMALRQGGLVMQNYRLIDATLYVTLEPCVMCAGAMIHSRIGRVVFGARDAKTGAAGSLMDVLHHPGMNHRVEITEGILADECAALLSDFFRMRRQEIKAQKKAQSSTDSGGSSGGSSGSETPGTSESATPESSGGSSGGSSEVEFSHEYWMRHALTLAKRARDEREVPVGAVLVLNNRVIGEGWNRAIGLHDPTAHAEIMALRQGGLVMQNYRLYDATLYVTFEPCVMCAGAMIHSRIGRVVFGVRNAKTGAAGSLMDVLHHPGMNHRVEITEGILADECAALLCRFFRMPRRVFNAQKKAQSSTDSGGSSGGSSGSETPGTSESATPESSGGSSGGSDKKYSIGLAIGTNSVGWAVITDEYKVPSKKFKVLGNTDRHSIKKNLIGALLFDSGETAEATRLKRTARRRYTRRKNRICYLQEIFSNEMAKVDDSFFHRLEESFLVEEDKKHERHPIFGNIVDEVAYHEKYPTIYHLRKKLVDSTDKADLRLIYLALAHMIKFRGHFLIEGDLNPDNSDVDKLFIQLVQTYNQLFEENPINASGVDAKAILSARLSKSRRLENLIAQLPGEKKNGLFGNLIALSLGLTPNFKSNFDLAEDAKLQLSKDTYDDDLDNLLAQIGDQYADLFLAAKNLSDAILLSDILRVNTEITKAPLSASMIKRYDEHHQDLTLLKALVRQQLPEKYKEIFFDQSKNGYAGYIDGGASQEEFYKFIKPILEKMDGTEELLVKLNREDLLRKQRTFDNGSIPHQIHLGELHAILRRQEDFYPFLKDNREKIEKILTFRIPYYVGPLARGNSRFAWMTRKSEETITPWNFEEVVDKGASAQSFIERMTNFDKNLPNEKVLPKHSLLYEYFTVYNELTKVKYVTEGMRKPAFLSGEQKKAIVDLLFKTNRKVTVKQLKEDYFKKIECFDSVEISGVEDRFNASLGTYHDLLKIIKDKDFLDNEENEDILEDIVLTLTLFEDREMIEERLKTYAHLFDDKVMKQLKRRRYTGWGRLSRKLINGIRDKQSGKTILDFLKSDGFANRNFMQLIHDDSLTFKEDIQKAQVSGQGDSLHEHIANLAGSPAIKKGILQTVKVVDELVKVMGRHKPENIVIEMARENQTTQKGQKNSRERMKRIEEGIKELGSQILKEHPVENTQLQNEKLYLYYLQNGRDMYVDQELDINRLSDYDVDHIVPQSFLKDDSIDNKVLTRSDKNRGKSDNVPSEEVVKKMKNYWRQLLNAKLITQRKFDNLTKAERGGLSELDKAGFIKRQLVETRQITKHVAQILDSRMNTKYDENDKLIREVKVITLKSKLVSDFRKDFQFYKVREINNYHHAHDAYLNAVVGTALIKKYPKLESEFVYGDYKVYDVRKMIAKSEQEIGKATAKYFFYSNIMNFFKTEITLANGEIRKRPLIETNGETGEIVWDKGRDFATVRKVLSMPQVNIVKKTEVQTGGFSKESILPKRNSDKLIARKKDWDPKKYGGFDSPTVAYSVLVVAKVEKGKSKKLKSVKELLGITIMERSSFEKNPIDFLEAKGYKEVKKDLIIKLPKYSLFELENGRKRMLASAGELQKGNELALPSKYVNFLYLASHYEKLKGSPEDNEQKQLFVEQHKHYLDEIIEQISEFSKRVILADANLDKVLSAYNKHRDKPIREQAENIIHLFTLTNLGAPAAFKYFDTTIDRKRYTSTKEVLDATLIHQSITGLYETRIDLSQLGGDEGADKRTADGSEFESPKKKRKV

SEQ ID NO: 337 - protein, 1588 aa, synthetic construct
  REGION 1..1588: note = ABE8.17-m polypeptide sequence
  REGION 1..167: note = MISC_FEATURE - Adenosine deaminase sequence
  REGION 168..199: note = MISC_FEATURE - Linker sequence
  REGION 200..1566: note = MISC_FEATURE - Sequence derived from Cas9
  REGION 1567..1588: note = MISC_FEATURE - Bipartite nuclear localization sequence
MSEVEFSHEYWMRHALTLAKRARDEREVPVGAVLVLNNRVIGEGWNRAIGLHDPTAHAEIMALRQGGLVMQNYRLIDATLYSTFEPCVMCAGAMIHSRIGRVVFGVRNAKTGAAGSLMDVLHYPGMNHRVEITEGILADECAALLCYFFRMPRRVFNAQKKAQSSTDSGGSSGGSSGSETPGTSESATPESSGGSSGGSDKKYSIGLAIGTNSVGWAVITDEYKVPSKKFKVLGNTDRHSIKKNLIGALLFDSGETAEATRLKRTARRRYTRRKNRICYLQEIFSNEMAKVDDSFFHRLEESFLVEEDKKHERHPIFGNIVDEVAYHEKYPTIYHLRKKLVDSTDKADLRLIYLALAHMIKFRGHFLIEGDLNPDNSDVDKLFIQLVQTYNQLFEENPINASGVDAKAILSARLSKSRRLENLIAQLPGEKKNGLFGNLIALSLGLTPNFKSNFDLAEDAKLQLSKDTYDDDLDNLLAQIGDQYADLFLAAKNLSDAILLSDILRVNTEITKAPLSASMIKRYDEHHQDLTLLKALVRQQLPEKYKEIFFDQSKNGYAGYIDGGASQEEFYKFIKPILEKMDGTEELLVKLNREDLLRKQRTFDNGSIPHQIHLGELHAILRRQEDFYPFLKDNREKIEKILTFRIPYYVGPLARGNSRFAWMTRKSEETITPWNFEEVVDKGASAQSFIERMTNFDKNLPNEKVLPKHSLLYEYFTVYNELTKVKYVTEGMRKPAFLSGEQKKAIVDLLFKTNRKVTVKQLKEDYFKKIECFDSVEISGVEDRFNASLGTYHDLLKIIKDKDFLDNEENEDILEDIVLTLTLFEDREMIEERLKTYAHLFDDKVMKQLKRRRYTGWGRLSRKLINGIRDKQSGKTILDFLKSDGFANRNFMQLIHDDSLTFKEDIQKAQVSGQGDSLHEHIANLAGSPAIKKGILQTVKVVDELVKVMGRHKPENIVIEMARENQTTQKGQKNSRERMKRIEEGIKELGSQILKEHPVENTQLQNEKLYLYYLQNGRDMYVDQELDINRLSDYDVDHIVPQSFLKDDSIDNKVLTRSDKNRGKSDNVPSEEVVKKMKNYWRQLLNAKLITQRKFDNLTKAERGGLSELDKAGFIKRQLVETRQITKHVAQILDSRMNTKYDENDKLIREVKVITLKSKLVSDFRKDFQFYKVREINNYHHAHDAYLNAVVGTALIKKYPKLESEFVYGDYKVYDVRKMIAKSEQEIGKATAKYFFYSNIMNFFKTEITLANGEIRKRPLIETNGETGEIVWDKGRDFATVRKVLSMPQVNIVKKTEVQTGGFSKESILPKRNSDKLIARKKDWDPKKYGGFDSPTVAYSVLVVAKVEKGKSKKLKSVKELLGITIMERSSFEKNPIDFLEAKGYKEVKKDLIIKLPKYSLFELENGRKRMLASAGELQKGNELALPSKYVNFLYLASHYEKLKGSPEDNEQKQLFVEQHKHYLDEIIEQISEFSKRVILADANLDKVLSAYNKHRDKPIREQAENIIHLFTLTNLGAPAAFKYFDTTIDRKRYTSTKEVLDATLIHQSITGLYETRIDLSQLGGDEGADKRTADGSEFESPKKKRKV

SEQ ID NO: 338 - protein, 1786 aa, synthetic construct
  REGION 1..1786: note = ABE8.17-d polypeptide sequence
  REGION 1..167: note = MISC_FEATURE - Adenosine deaminase sequence
  REGION 168..199: note = MISC_FEATURE - Linker sequence
  REGION 200..365: note = MISC_FEATURE - Adenosine deaminase sequence
  REGION 366..397: note = MISC_FEATURE - Linker sequence
  REGION 398..1764: note = MISC_FEATURE - Sequence derived from Cas9
  REGION 1765..1786: note = MISC_FEATURE - Bipartite nuclear localization sequence
MSEVEFSHEYWMRHALTLAKRAWDEREVPVGAVLVHNNRVIGEGWNRPIGRHDPTAHAEIMALRQGGLVMQNYRLIDATLYVTLEPCVMCAGAMIHSRIGRVVFGARDAKTGAAGSLMDVLHHPGMNHRVEITEGILADECAALLSDFFRMRRQEIKAQKKAQSSTDSGGSSGGSSGSETPGTSESATPESSGGSSGGSSEVEFSHEYWMRHALTLAKRARDEREVPVGAVLVLNNRVIGEGWNRAIGLHDPTAHAEIMALRQGGLVMQNYRLIDATLYSTFEPCVMCAGAMIHSRIGRVVFGVRNAKTGAAGSLMDVLHYPGMNHRVEITEGILADECAALLCYFFRMPRRVFNAQKKAQSSTDSGGSSGGSSGSETPGTSESATPESSGGSSGGSDKKYSIGLAIGTNSVGWAVITDEYKVPSKKFKVLGNTDRHSIKKNLIGALLFDSGETAEATRLKRTARRRYTRRKNRICYLQEIFSNEMAKVDDSFFHRLEESFLVEEDKKHERHPIFGNIVDEVAYHEKYPTIYHLRKKLVDSTDKADLRLIYLALAHMIKFRGHFLIEGDLNPDNSDVDKLFIQLVQTYNQLFEENPINASGVDAKAILSARLSKSRRLENLIAQLPGEKKNGLFGNLIALSLGLTPNFKSNFDLAEDAKLQLSKDTYDDDLDNLLAQIGDQYADLFLAAKNLSDAILLSDILRVNTEITKAPLSASMIKRYDEHHQDLTLLKALVRQQLPEKYKEIFFDQSKNGYAGYIDGGASQEEFYKFIKPILEKMDGTEELLVKLNREDLLRKQRTFDNGSIPHQIHLGELHAILRRQEDFYPFLKDNREKIEKILTFRIPYYVGPLARGNSRFAWMTRKSEETITPWNFEEVVDKGASAQSFIERMTNFDKNLPNEKVLPKHSLLYEYFTVYNELTKVKYVTEGMRKPAFLSGEQKKAIVDLLFKTNRKVTVKQLKEDYFKKIECFDSVEISGVEDRFNASLGTYHDLLKIIKDKDFLDNEENEDILEDIVLTLTLFEDREMIEERLKTYAHLFDDKVMKQLKRRRYTGWGRLSRKLINGIRDKQSGKTILDFLKSDGFANRNFMQLIHDDSLTFKEDIQKAQVSGQGDSLHEHIANLAGSPAIKKGILQTVKVVDELVKVMGRHKPENIVIEMARENQTTQKGQKNSRERMKRIEEGIKELGSQILKEHPVENTQLQNEKLYLYYLQNGRDMYVDQELDINRLSDYDVDHIVPQSFLKDDSIDNKVLTRSDKNRGKSDNVPSEEVVKKMKNYWRQLLNAKLITQRKFDNLTKAERGGLSELDKAGFIKRQLVETRQITKHVAQILDSRMNTKYDENDKLIREVKVITLKSKLVSDFRKDFQFYKVREINNYHHAHDAYLNAVVGTALIKKYPKLESEFVYGDYKVYDVRKMIAKSEQEIGKATAKYFFYSNIMNFFKTEITLANGEIRKRPLIETNGETGEIVWDKGRDFATVRKVLSMPQVNIVKKTEVQTGGFSKESILPKRNSDKLIARKKDWDPKKYGGFDSPTVAYSVLVVAKVEKGKSKKLKSVKELLGITIMERSSFEKNPIDFLEAKGYKEVKKDLIIKLPKYSLFELENGRKRMLASAGELQKGNELALPSKYVNFLYLASHYEKLKGSPEDNEQKQLFVEQHKHYLDEIIEQISEFSKRVILADANLDKVLSAYNKHRDKPIREQAENIIHLFTLTNLGAPAAFKYFDTTIDRKRYTSTKEVLDATLIHQSITGLYETRIDLSQLGGDEGADKRTADGSEFESPKKKRKV

SEQ ID NO: 339 - protein, 1588 aa, synthetic construct
  REGION 1..1588: note = ABE8.20-m polypeptide sequence
  REGION 1..167: note = MISC_FEATURE - Adenosine deaminase sequence
  REGION 168..199: note = MISC_FEATURE - Linker sequence
  REGION 200..1566: note = MISC_FEATURE - Sequence derived from Cas9
  REGION 1567..1588: note = MISC_FEATURE - Bipartite nuclear localization sequence
MSEVEFSHEYWMRHALTLAKRARDEREVPVGAVLVLNNRVIGEGWNRAIGLHDPTAHAEIMALRQGGLVMQNYRLYDATLYSTFEPCVMCAGAMIHSRIGRVVFGVRNAKTGAAGSLMDVLHHPGMNHRVEITEGILADECAALLCRFFRMPRRVFNAQKKAQSSTDSGGSSGGSSGSETPGTSESATPESSGGSSGGSDKKYSIGLAIGTNSVGWAVITDEYKVPSKKFKVLGNTDRHSIKKNLIGALLFDSGETAEATRLKRTARRRYTRRKNRICYLQEIFSNEMAKVDDSFFHRLEESFLVEEDKKHERHPIFGNIVDEVAYHEKYPTIYHLRKKLVDSTDKADLRLIYLALAHMIKFRGHFLIEGDLNPDNSDVDKLFIQLVQTYNQLFEENPINASGVDAKAILSARLSKSRRLENLIAQLPGEKKNGLFGNLIALSLGLTPNFKSNFDLAEDAKLQLSKDTYDDDLDNLLAQIGDQYADLFLAAKNLSDAILLSDILRVNTEITKAPLSASMIKRYDEHHQDLTLLKALVRQQLPEKYKEIFFDQSKNGYAGYIDGGASQEEFYKFIKPILEKMDGTEELLVKLNREDLLRKQRTFDNGSIPHQIHLGELHAILRRQEDFYPFLKDNREKIEKILTFRIPYYVGPLARGNSRFAWMTRKSEETITPWNFEEVVDKGASAQSFIERMTNFDKNLPNEKVLPKHSLLYEYFTVYNELTKVKYVTEGMRKPAFLSGEQKKAIVDLLFKTNRKVTVKQLKEDYFKKIECFDSVEISGVEDRFNASLGTYHDLLKIIKDKDFLDNEENEDILEDIVLTLTLFEDREMIEERLKTYAHLFDDKVMKQLKRRRYTGWGRLSRKLINGIRDKQSGKTILDFLKSDGFANRNFMQLIHDDSLTFKEDIQKAQVSGQGDSLHEHIANLAGSPAIKKGILQTVKVVDELVKVMGRHKPENIVIEMARENQTTQKGQKNSRERMKRIEEGIKELGSQILKEHPVENTQLQNEKLYLYYLQNGRDMYVDQELDINRLSDYDVDHIVPQSFLKDDSIDNKVLTRSDKNRGKSDNVPSEEVVKKMKNYWRQLLNAKLITQRKFDNLTKAERGGLSELDKAGFIKRQLVETRQITKHVAQILDSRMNTKYDENDKLIREVKVITLKSKLVSDFRKDFQFYKVREINNYHHAHDAYLNAVVGTALIKKYPKLESEFVYGDYKVYDVRKMIAKSEQEIGKATAKYFFYSNIMNFFKTEITLANGEIRKRPLIETNGETGEIVWDKGRDFATVRKVLSMPQVNIVKKTEVQTGGFSKESILPKRNSDKLIARKKDWDPKKYGGFDSPTVAYSVLVVAKVEKGKSKKLKSVKELLGITIMERSSFEKNPIDFLEAKGYKEVKKDLIIKLPKYSLFELENGRKRMLASAGELQKGNELALPSKYVNFLYLASHYEKLKGSPEDNEQKQLFVEQHKHYLDEIIEQISEFSKRVILADANLDKVLSAYNKHRDKPIREQAENIIHLFTLTNLGAPAAFKYFDTTIDRKRYTSTKEVLDATLIHQSITGLYETRIDLSQLGGDEGADKRTADGSEFESPKKKRKV

SEQ ID NO: 340 - protein, 1786 aa, synthetic construct
  REGION 1..1786: note = ABE8.20-d polypeptide sequence
  REGION 1..167: note = MISC_FEATURE - Adenosine deaminase sequence
  REGION 168..199: note = MISC_FEATURE - Linker sequence
  REGION 200..365: note = MISC_FEATURE - Adenosine deaminase sequence
  REGION 366..397: note = MISC_FEATURE - Linker sequence
  REGION 398..1764: note = MISC_FEATURE - Sequence derived from Cas9
  REGION 1765..1786: note = MISC_FEATURE - Bipartite nuclear localization sequence
MSEVEFSHEYWMRHALTLAKRAWDEREVPVGAVLVHNNRVIGEGWNRPIGRHDPTAHAEIMALRQGGLVMQNYRLIDATLYVTLEPCVMCAGAMIHSRIGRVVFGARDAKTGAAGSLMDVLHHPGMNHRVEITEGILADECAALLSDFFRMRRQEIKAQKKAQSSTDSGGSSGGSSGSETPGTSESATPESSGGSSGGSSEVEFSHEYWMRHALTLAKRARDEREVPVGAVLVLNNRVIGEGWNRAIGLHDPTAHAEIMALRQGGLVMQNYRLYDATLYSTFEPCVMCAGAMIHSRIGRVVFGVRNAKTGAAGSLMDVLHHPGMNHRVEITEGILADECAALLCRFFRMPRRVFNAQKKAQSSTDSGGSSGGSSGSETPGTSESATPESSGGSSGGSDKKYSIGLAIGTNSVGWAVITDEYKVPSKKFKVLGNTDRHSIKKNLIGALLFDSGETAEATRLKRTARRRYTRRKNRICYLQEIFSNEMAKVDDSFFHRLEESFLVEEDKKHERHPIFGNIVDEVAYHEKYPTIYHLRKKLVDSTDKADLRLIYLALAHMIKFRGHFLIEGDLNPDNSDVDKLFIQLVQTYNQLFEENPINASGVDAKAILSARLSKSRRLENLIAQLPGEKKNGLFGNLIALSLGLTPNFKSNFDLAEDAKLQLSKDTYDDDLDNLLAQIGDQYADLFLAAKNLSDAILLSDILRVNTEITKAPLSASMIKRYDEHHQDLTLLKALVRQQLPEKYKEIFFDQSKNGYAGYIDGGASQEEFYKFIKPILEKMDGTEELLVKLNREDLLRKQRTFDNGSIPHQIHLGELHAILRRQEDFYPFLKDNREKIEKILTFRIPYYVGPLARGNSRFAWMTRKSEETITPWNFEEVVDKGASAQSFIERMTNFDKNLPNEKVLPKHSLLYEYFTVYNELTKVKYVTEGMRKPAFLSGEQKKAIVDLLFKTNRKVTVKQLKEDYFKKIECFDSVEISGVEDRFNASLGTYHDLLKIIKDKDFLDNEENEDILEDIVLTLTLFEDREMIEERLKTYAHLFDDKVMKQLKRRRYTGWGRLSRKLINGIRDKQSGKTILDFLKSDGFANRNFMQLIHDDSLTFKEDIQKAQVSGQGDSLHEHIANLAGSPAIKKGILQTVKVVDELVKVMGRHKPENIVIEMARENQTTQKGQKNSRERMKRIEEGIKELGSQILKEHPVENTQLQNEKLYLYYLQNGRDMYVDQELDINRLSDYDVDHIVPQSFLKDDSIDNKVLTRSDKNRGKSDNVPSEEVVKKMKNYWRQLLNAKLITQRKFDNLTKAERGGLSELDKAGFIKRQLVETRQITKHVAQILDSRMNTKYDENDKLIREVKVITLKSKLVSDFRKDFQFYKVREINNYHHAHDAYLNAVVGTALIKKYPKLESEFVYGDYKVYDVRKMIAKSEQEIGKATAKYFFYSNIMNFFKTEITLANGEIRKRPLIETNGETGEIVWDKGRDFATVRKVLSMPQVNIVKKTEVQTGGFSKESILPKRNSDKLIARKKDWDPKKYGGFDSPTVAYSVLVVAKVEKGKSKKLKSVKELLGITIMERSSFEKNPIDFLEAKGYKEVKKDLIIKLPKYSLFELENGRKRMLASAGELQKGNELALPSKYVNFLYLASHYEKLKGSPEDNEQKQLFVEQHKHYLDEIIEQISEFSKRVILADANLDKVLSAYNKHRDKPIREQAENIIHLFTLTNLGAPAAFKYFDTTIDRKRYTSTKEVLDATLIHQSITGLYETRIDLSQLGGDEGADKRTADGSEFESPKKKRKV

SEQ ID NO: 341 - protein, 1588 aa, synthetic construct
  REGION 1..1588: note = 01. monoABE8.1_bpNLS + Y147T polypeptide sequence
MSEVEFSHEYWMRHALTLAKRARDEREVPVGAVLVLNNRVIGEGWNRAIGLHDPTAHAEIMALRQGGLVMQNYRLIDATLYVTFEPCVMCAGAMIHSRIGRVVFGVRNAKTGAAGSLMDVLHYPGMNHRVEITEGILADECAALLCTFFRMPRQVFNAQKKAQSSTDSGGSSGGSSGSETPGTSESATPESSGGSSGGSDKKYSIGLAIGTNSVGWAVITDEYKVPSKKFKVLGNTDRHSIKKNLIGALLFDSGETAEATRLKRTARRRYTRRKNRICYLQEIFSNEMAKVDDSFFHRLEESFLVEEDKKHERHPIFGNIVDEVAYHEKYPTIYHLRKKLVDSTDKADLRLIYLALAHMIKFRGHFLIEGDLNPDNSDVDKLFIQLVQTYNQLFEENPINASGVDAKAILSARLSKSRRLENLIAQLPGEKKNGLFGNLIALSLGLTPNFKSNFDLAEDAKLQLSKDTYDDDLDNLLAQIGDQYADLFLAAKNLSDAILLSDILRVNTEITKAPLSASMIKRYDEHHQDLTLLKALVRQQLPEKYKEIFFDQSKNGYAGYIDGGASQEEFYKFIKPILEKMDGTEELLVKLNREDLLRKQRTFDNGSIPHQIHLGELHAILRRQEDFYPFLKDNREKIEKILTFRIPYYVGPLARGNSRFAWMTRKSEETITPWNFEEVVDKGASAQSFIERMTNFDKNLPNEKVLPKHSLLYEYFTVYNELTKVKYVTEGMRKPAFLSGEQKKAIVDLLFKTNRKVTVKQLKEDYFKKIECFDSVEISGVEDRFNASLGTYHDLLKIIKDKDFLDNEENEDILEDIVLTLTLFEDREMIEERLKTYAHLFDDKVMKQLKRRRYTGWGRLSRKLINGIRDKQSGKTILDFLKSDGFANRNFMQLIHDDSLTFKEDIQKAQVSGQGDSLHEHIANLAGSPAIKKGILQTVKVVDELVKVMGRHKPENIVIEMARENQTTQKGQKNSRERMKRIEEGIKELGSQILKEHPVENTQLQNEKLYLYYLQNGRDMYVDQELDINRLSDYDVDHIVPQSFLKDDSIDNKVLTRSDKNRGKSDNVPSEEVVKKMKNYWRQLLNAKLITQRKFDNLTKAERGGLSELDKAGFIKRQLVETRQITKHVAQILDSRMNTKYDENDKLIREVKVITLKSKLVSDFRKDFQFYKVREINNYHHAHDAYLNAVVGTALIKKYPKLESEFVYGDYKVYDVRKMIAKSEQEIGKATAKYFFYSNIMNFFKTEITLANGEIRKRPLIETNGETGEIVWDKGRDFATVRKVLSMPQVNIVKKTEVQTGGFSKESILPKRNSDKLIARKKDWDPKKYGGFVSPTVAYSVLVVAKVEKGKSKKLKSVKELLGITIMERSSFEKNPIDFLEAKGYKEVKKDLIIKLPKYSLFELENGRKRMLASARELQKGNELALPSKYVNFLYLASHYEKLKGSPEDNEQKQLFVEQHKHYLDEIIEQISEFSKRVILADANLDKVLSAYNKHRDKPIREQAENIIHLFTLTNLGAPAAFKYFDTTIDRKQYRSTKEVLDATLIHQSITGLYETRIDLSQLGGDEGADKRTADGSEFESPKKKRKV

SEQ ID NO: 342 - protein, 1588 aa, synthetic construct
  REGION 1..1588: note = 02. monoABE8.1_bpNLS + Y147R polypeptide sequence
MSEVEFSHEYWMRHALTLAKRARDEREVPVGAVLVLNNRVIGEGWNRAIGLHDPTAHAEIMALRQGGLVMQNYRLIDATLYVTFEPCVMCAGAMIHSRIGRVVFGVRNAKTGAAGSLMDVLHYPGMNHRVEITEGILADECAALLCRFFRMPRQVFNAQKKAQSSTDSGGSSGGSSGSETPGTSESATPESSGGSSGGSDKKYSIGLAIGTNSVGWAVITDEYKVPSKKFKVLGNTDRHSIKKNLIGALLFDSGETAEATRLKRTARRRYTRRKNRICYLQEIFSNEMAKVDDSFFHRLEESFLVEEDKKHERHPIFGNIVDEVAYHEKYPTIYHLRKKLVDSTDKADLRLIYLALAHMIKFRGHFLIEGDLNPDNSDVDKLFIQLVQTYNQLFEENPINASGVDAKAILSARLSKSRRLENLIAQLPGEKKNGLFGNLIALSLGLTPNFKSNFDLAEDAKLQLSKDTYDDDLDNLLAQIGDQYADLFLAAKNLSDAILLSDILRVNTEITKAPLSASMIKRYDEHHQDLTLLKALVRQQLPEKYKEIFFDQSKNGYAGYIDGGASQEEFYKFIKPILEKMDGTEELLVKLNREDLLRKQRTFDNGSIPHQIHLGELHAILRRQEDFYPFLKDNREKIEKILTFRIPYYVGPLARGNSRFAWMTRKSEETITPWNFEEVVDKGASAQSFIERMTNFDKNLPNEKVLPKHSLLYEYFTVYNELTKVKYVTEGMRKPAFLSGEQKKAIVDLLFKTNRKVTVKQLKEDYFKKIECFDSVEISGVEDRFNASLGTYHDLLKIIKDKDFLDNEENEDILEDIVLTLTLFEDREMIEERLKTYAHLFDDKVMKQLKRRRYTGWGRLSRKLINGIRDKQSGKTILDFLKSDGFANRNFMQLIHDDSLTFKEDIQKAQVSGQGDSLHEHIANLAGSPAIKKGILQTVKVVDELVKVMGRHKPENIVIEMARENQTTQKGQKNSRERMKRIEEGIKELGSQILKEHPVENTQLQNEKLYLYYLQNGRDMYVDQELDINRLSDYDVDHIVPQSFLKDDSIDNKVLTRSDKNRGKSDNVPSEEVVKKMKNYWRQLLNAKLITQRKFDNLTKAERGGLSELDKAGFIKRQLVETRQITKHVAQILDSRMNTKYDENDKLIREVKVITLKSKLVSDFRKDFQFYKVREINNYHHAHDAYLNAVVGTALIKKYPKLESEFVYGDYKVYDVRKMIAKSEQEIGKATAKYFFYSNIMNFFKTEITLANGEIRKRPLIETNGETGEIVWDKGRDFATVRKVLSMPQVNIVKKTEVQTGGFSKESILPKRNSDKLIARKKDWDPKKYGGFVSPTVAYSVLVVAKVEKGKSKKLKSVKELLGITIMERSSFEKNPIDFLEAKGYKEVKKDLIIKLPKYSLFELENGRKRMLASARELQKGNELALPSKYVNFLYLASHYEKLKGSPEDNEQKQLFVEQHKHYLDEIIEQISEFSKRVILADANLDKVLSAYNKHRDKPIREQAENIIHLFTLTNLGAPAAFKYFDTTIDRKQYRSTKEVLDATLIHQSITGLYETRIDLSQLGGDEGADKRTADGSEFESPKKKRKV

SEQ ID NO: 343 - protein, 1588 aa, synthetic construct
  REGION 1..1588: note = 03. monoABE8.1_bpNLS + Q154S polypeptide sequence
MSEVEFSHEYWMRHALTLAKRARDEREVPVGAVLVLNNRVIGEGWNRAIGLHDPTAHAEIMALRQGGLVMQNYRLIDATLYVTFEPCVMCAGAMIHSRIGRVVFGVRNAKTGAAGSLMDVLHYPGMNHRVEITEGILADECAALLCYFFRMPRSVFNAQKKAQSSTDSGGSSGGSSGSETPGTSESATPESSGGSSGGSDKKYSIGLAIGTNSVGWAVITDEYKVPSKKFKVLGNTDRHSIKKNLIGALLFDSGETAEATRLKRTARRRYTRRKNRICYLQEIFSNEMAKVDDSFFHRLEESFLVEEDKKHERHPIFGNIVDEVAYHEKYPTIYHLRKKLVDSTDKADLRLIYLALAHMIKFRGHFLIEGDLNPDNSDVDKLFIQLVQTYNQLFEENPINASGVDAKAILSARLSKSRRLENLIAQLPGEKKNGLFGNLIALSLGLTPNFKSNFDLAEDAKLQLSKDTYDDDLDNLLAQIGDQYADLFLAAKNLSDAILLSDILRVNTEITKAPLSASMIKRYDEHHQDLTLLKALVRQQLPEKYKEIFFDQSKNGYAGYIDGGASQEEFYKFIKPILEKMDGTEELLVKLNREDLLRKQRTFDNGSIPHQIHLGELHAILRRQEDFYPFLKDNREKIEKILTFRIPYYVGPLARGNSRFAWMTRKSEETITPWNFEEVVDKGASAQSFIERMTNFDKNLPNEKVLPKHSLLYEYFTVYNELTKVKYVTEGMRKPAFLSGEQKKAIVDLLFKTNRKVTVKQLKEDYFKKIECFDSVEISGVEDRFNASLGTYHDLLKIIKDKDFLDNEENEDILEDIVLTLTLFEDREMIEERLKTYAHLFDDKVMKQLKRRRYTGWGRLSRKLINGIRDKQSGKTILDFLKSDGFANRNFMQLIHDDSLTFKEDIQKAQVSGQGDSLHEHIANLAGSPAIKKGILQTVKVVDELVKVMGRHKPENIVIEMARENQTTQKGQKNSRERMKRIEEGIKELGSQILKEHPVENTQLQNEKLYLYYLQNGRDMYVDQELDINRLSDYDVDHIVPQSFLKDDSIDNKVLTRSDKNRGKSDNVPSEEVVKKMKNYWRQLLNAKLITQRKFDNLTKAERGGLSELDKAGFIKRQLVETRQITKHVAQILDSRMNTKYDENDKLIREVKVITLKSKLVSDFRKDFQFYKVREINNYHHAHDAYLNAVVGTALIKKYPKLESEFVYGDYKVYDVRKMIAKSEQEIGKATAKYFFYSNIMNFFKTEITLANGEIRKRPLIETNGETGEIVWDKGRDFATVRKVLSMPQVNIVKKTEVQTGGFSKESILPKRNSDKLIARKKDWDPKKYGGFVSPTVAYSVLVVAKVEKGKSKKLKSVKELLGITIMERSSFEKNPIDFLEAKGYKEVKKDLIIKLPKYSLFELENGRKRMLASARELQKGNELALPSKYVNFLYLASHYEKLKGSPEDNEQKQLFVEQHKHYLDEIIEQISEFSKRVILADANLDKVLSAYNKHRDKPIREQAENIIHLFTLTNLGAPAAFKYFDTTIDRKQYRSTKEVLDATLIHQSITGLYETRIDLSQLGGDEGADKRTADGSEFESPKKKRKV

SEQ ID NO: 344 - protein, 1588 aa, synthetic construct
  REGION 1..1588: note = 04. monoABE8.1_bpNLS + Y123H polypeptide sequence
MSEVEFSHEYWMRHALTLAKRARDEREVPVGAVLVLNNRVIGEGWNRAIGLHDPTAHAEIMALRQGGLVMQNYRLIDATLYVTFEPCVMCAGAMIHSRIGRVVFGVRNAKTGAAGSLMDVLHHPGMNHRVEITEGILADECAALLCYFFRMPRQVFNAQKKAQSSTDSGGSSGGSSGSETPGTSESATPESSGGSSGGSDKKYSIGLAIGTNSVGWAVITDEYKVPSKKFKVLGNTDRHSIKKNLIGALLFDSGETAEATRLKRTARRRYTRRKNRICYLQEIFSNEMAKVDDSFFHRLEESFLVEEDKKHERHPIFGNIVDEVAYHEKYPTIYHLRKKLVDSTDKADLRLIYLALAHMIKFRGHFLIEGDLNPDNSDVDKLFIQLVQTYNQLFEENPINASGVDAKAILSARLSKSRRLENLIAQLPGEKKNGLFGNLIALSLGLTPNFKSNFDLAEDAKLQLSKDTYDDDLDNLLAQIGDQYADLFLAAKNLSDAILLSDILRVNTEITKAPLSASMIKRYDEHHQDLTLLKALVRQQLPEKYKEIFFDQSKNGYAGYIDGGASQEEFYKFIKPILEKMDGTEELLVKLNREDLLRKQRTFDNGSIPHQIHLGELHAILRRQEDFYPFLKDNREKIEKILTFRIPYYVGPLARGNSRFAWMTRKSEETITPWNFEEVVDKGASAQSFIERMTNFDKNLPNEKVLPKHSLLYEYFTVYNELTKVKYVTEGMRKPAFLSGEQKKAIVDLLFKTNRKVTVKQLKEDYFKKIECFDSVEISGVEDRFNASLGTYHDLLKIIKDKDFLDNEENEDILEDIVLTLTLFEDREMIEERLKTYAHLFDDKVMKQLKRRRYTGWGRLSRKLINGIRDKQSGKTILDFLKSDGFANRNFMQLIHDDSLTFKEDIQKAQVSGQGDSLHEHIANLAGSPAIKKGILQTVKVVDELVKVMGRHKPENIVIEMARENQTTQKGQKNSRERMKRIEEGIKELGSQILKEHPVENTQLQNEKLYLYYLQNGRDMYVDQELDINRLSDYDVDHIVPQSFLKDDSIDNKVLTRSDKNRGKSDNVPSEEVVKKMKNYWRQLLNAKLITQRKFDNLTKAERGGLSELDKAGFIKRQLVETRQITKHVAQILDSRMNTKYDENDKLIREVKVITLKSKLVSDFRKDFQFYKVREINNYHHAHDAYLNAVVGTALIKKYPKLESEFVYGDYKVYDVRKMIAKSEQEIGKATAKYFFYSNIMNFFKTEITLANGEIRKRPLIETNGETGEIVWDKGRDFATVRKVLSMPQVNIVKKTEVQTGGFSKESILPKRNSDKLIARKKDWDPKKYGGFVSPTVAYSVLVVAKVEKGKSKKLKSVKELLGITIMERSSFEKNPIDFLEAKGYKEVKKDLIIKLPKYSLFELENGRKRMLASARELQKGNELALPSKYVNFLYLASHYEKLKGSPEDNEQKQLFVEQHKHYLDEIIEQISEFSKRVILADANLDKVLSAYNKHRDKPIREQAENIIHLFTLTNLGAPAAFKYFDTTIDRKQYRSTKEVLDATLIHQSITGLYETRIDLSQLGGDEGADKRTADGSEFESPKKKRKV

SEQ ID NO: 345 - protein, 1588 aa, synthetic construct
  REGION 1..1588: note = 05. monoABE8.1_bpNLS + V82S polypeptide sequence
MSEVEFSHEYWMRHALTLAKRARDEREVPVGAVLVLNNRVIGEGWNRAIGLHDPTAHAEIMALRQGGLVMQNYRLIDATLYSTFEPCVMCAGAMIHSRIGRVVFGVRNAKTGAAGSLMDVLHYPGMNHRVEITEGILADECAALLCYFFRMPRQVFNAQKKAQSSTDSGGSSGGSSGSETPGTSESATPESSGGSSGGSDKKYSIGLAIGTNSVGWAVITDEYKVPSKKFKVLGNTDRHSIKKNLIGALLFDSGETAEATRLKRTARRRYTRRKNRICYLQEIFSNEMAKVDDSFFHRLEESFLVEEDKKHERHPIFGNIVDEVAYHEKYPTIYHLRKKLVDSTDKADLRLIYLALAHMIKFRGHFLIEGDLNPDNSDVDKLFIQLVQTYNQLFEENPINASGVDAKAILSARLSKSRRLENLIAQLPGEKKNGLFGNLIALSLGLTPNFKSNFDLAEDAKLQLSKDTYDDDLDNLLAQIGDQYADLFLAAKNLSDAILLSDILRVNTEITKAPLSASMIKRYDEHHQDLTLLKALVRQQLPEKYKEIFFDQSKNGYAGYIDGGASQEEFYKFIKPILEKMDGTEELLVKLNREDLLRKQRTFDNGSIPHQIHLGELHAILRRQEDFYPFLKDNREKIEKILTFRIPYYVGPLARGNSRFAWMTRKSEETITPWNFEEVVDKGASAQSFIERMTNFDKNLPNEKVLPKHSLLYEYFTVYNELTKVKYVTEGMRKPAFLSGEQKKAIVDLLFKTNRKVTVKQLKEDYFKKIECFDSVEISGVEDRFNASLGTYHDLLKIIKDKDFLDNEENEDILEDIVLTLTLFEDREMIEERLKTYAHLFDDKVMKQLKRRRYTGWGRLSRKLINGIRDKQSGKTILDFLKSDGFANRNFMQLIHDDSLTFKEDIQKAQVSGQGDSLHEHIANLAGSPAIKKGILQTVKVVDELVKVMGRHKPENIVIEMARENQTTQKGQKNSRERMKRIEEGIKELGSQILKEHPVENTQLQNEKLYLYYLQNGRDMYVDQELDINRLSDYDVDHIVPQSFLKDDSIDNKVLTRSDKNRGKSDNVPSEEVVKKMKNYWRQLLNAKLITQRKFDNLTKAERGGLSELDKAGFIKRQLVETRQITKHVAQILDSRMNTKYDENDKLIREVKVITLKSKLVSDFRKDFQFYKVREINNYHHAHDAYLNAVVGTALIKKYPKLESEFVYGDYKVYDVRKMIAKSEQEIGKATAKYFFYSNIMNFFKTEITLANGEIRKRPLIETNGETGEIVWDKGRDFATVRKVLSMPQVNIVKKTEVQTGGFSKESILPKRNSDKLIARKKDWDPKKYGGFVSPTVAYSVLVVAKVEKGKSKKLKSVKELLGITIMERSSFEKNPIDFLEAKGYKEVKKDLIIKLPKYSLFELENGRKRMLASARELQKGNELALPSKYVNFLYLASHYEKLKGSPEDNEQKQLFVEQHKHYLDEIIEQISEFSKRVILADANLDKVLSAYNKHRDKPIREQAENIIHLFTLTNLGAPAAFKYFDTTIDRKQYRSTKEVLDATLIHQSITGLYETRIDLSQLGGDEGADKRTADGSEFESPKKKRKV

SEQ ID NO: 346 - protein, 1588 aa, synthetic construct
  REGION 1..1588: note = 06. monoABE8.1_bpNLS + T166R polypeptide sequence
MSEVEFSHEYWMRHALTLAKRARDEREVPVGAVLVLNNRVIGEGWNRAIGLHDPTAHAEIMALRQGGLVMQNYRLIDATLYVTFEPCVMCAGAMIHSRIGRVVFGVRNAKTGAAGSLMDVLHYPGMNHRVEITEGILADECAALLCYFFRMPRQVFNAQKKAQSSRDSGGSSGGSSGSETPGTSESATPESSGGSSGGSDKKYSIGLAIGTNSVGWAVITDEYKVPSKKFKVLGNTDRHSIKKNLIGALLFDSGETAEATRLKRTARRRYTRRKNRICYLQEIFSNEMAKVDDSFFHRLEESFLVEEDKKHERHPIFGNIVDEVAYHEKYPTIYHLRKKLVDSTDKADLRLIYLALAHMIKFRGHFLIEGDLNPDNSDVDKLFIQLVQTYNQLFEENPINASGVDAKAILSARLSKSRRLENLIAQLPGEKKNGLFGNLIALSLGLTPNFKSNFDLAEDAKLQLSKDTYDDDLDNLLAQIGDQYADLFLAAKNLSDAILLSDILRVNTEITKAPLSASMIKRYDEHHQDLTLLKALVRQQLPEKYKEIFFDQSKNGYAGYIDGGASQEEFYKFIKPILEKMDGTEELLVKLNREDLLRKQRTFDNGSIPHQIHLGELHAILRRQEDFYPFLKDNREKIEKILTFRIPYYVGPLARGNSRFAWMTRKSEETITPWNFEEVVDKGASAQSFIERMTNFDKNLPNEKVLPKHSLLYEYFTVYNELTKVKYVTEGMRKPAFLSGEQKKAIVDLLFKTNRKVTVKQLKEDYFKKIECFDSVEISGVEDRFNASLGTYHDLLKIIKDKDFLDNEENEDILEDIVLTLTLFEDREMIEERLKTYAHLFDDKVMKQLKRRRYTGWGRLSRKLINGIRDKQSGKTILDFLKSDGFANRNFMQLIHDDSLTFKEDIQKAQVSGQGDSLHEHIANLAGSPAIKKGILQTVKVVDELVKVMGRHKPENIVIEMARENQTTQKGQKNSRERMKRIEEGIKELGSQILKEHPVENTQLQNEKLYLYYLQNGRDMYVDQELDINRLSDYDVDHIVPQSFLKDDSIDNKVLTRSDKNRGKSDNVPSEEVVKKMKNYWRQLLNAKLITQRKFDNLTKAERGGLSELDKAGFIKRQLVETRQITKHVAQILDSRMNTKYDENDKLIREVKVITLKSKLVSDFRKDFQFYKVREINNYHHAHDAYLNAVVGTALIKKYPKLESEFVYGDYKVYDVRKMIAKSEQEIGKATAKYFFYSNIMNFFKTEITLANGEIRKRPLIETNGETGEIVWDKGRDFATVRKVLSMPQVNIVKKTEVQTGGFSKESILPKRNSDKLIARKKDWDPKKYGGFVSPTVAYSVLVVAKVEKGKSKKLKSVKELLGITIMERSSFEKNPIDFLEAKGYKEVKKDLIIKLPKYSLFELENGRKRMLASARELQKGNELALPSKYVNFLYLASHYEKLKGSPEDNEQKQLFVEQHKHYLDEIIEQISEFSKRVILADANLDKVLSAYNKHRDKPIREQAENIIHLFTLTNLGAPAAFKYFDTTIDRKQYRSTKEVLDATLIHQSITGLYETRIDLSQLGGDEGADKRTADGSEFESPKKKRKV

SEQ ID NO: 347 - protein, 1588 aa, synthetic construct
  REGION 1..1588: note = 07. monoABE8.1_bpNLS + Q154R polypeptide sequence
MSEVEFSHEYWMRHALTLAKRARDEREVPVGAVLVLNNRVIGEGWNRAIGLHDPTAHAEIMALRQGGLVMQNYRLIDATLYVTFEPCVMCAGAMIHSRIGRVVFGVRNAKTGAAGSLMDVLHYPGMNHRVEITEGILADECAALLCYFFRMPRRVFNAQKKAQSSTDSGGSSGGSSGSETPGTSESATPESSGGSSGGSDKKYSIGLAIGTNSVGWAVITDEYKVPSKKFKVLGNTDRHSIKKNLIGALLFDSGETAEATRLKRTARRRYTRRKNRICYLQEIFSNEMAKVDDSFFHRLEESFLVEEDKKHERHPIFGNIVDEVAYHEKYPTIYHLRKKLVDSTDKADLRLIYLALAHMIKFRGHFLIEGDLNPDNSDVDKLFIQLVQTYNQLFEENPINASGVDAKAILSARLSKSRRLENLIAQLPGEKKNGLFGNLIALSLGLTPNFKSNFDLAEDAKLQLSKDTYDDDLDNLLAQIGDQYADLFLAAKNLSDAILLSDILRVNTEITKAPLSASMIKRYDEHHQDLTLLKALVRQQLPEKYKEIFFDQSKNGYAGYIDGGASQEEFYKFIKPILEKMDGTEELLVKLNREDLLRKQRTFDNGSIPHQIHLGELHAILRRQEDFYPFLKDNREKIEKILTFRIPYYVGPLARGNSRFAWMTRKSEETITPWNFEEVVDKGASAQSFIERMTNFDKNLPNEKVLPKHSLLYEYFTVYNELTKVKYVTEGMRKPAFLSGEQKKAIVDLLFKTNRKVTVKQLKEDYFKKIECFDSVEISGVEDRFNASLGTYHDLLKIIKDKDFLDNEENEDILEDIVLTLTLFEDREMIEERLKTYAHLFDDKVMKQLKRRRYTGWGRLSRKLINGIRDKQSGKTILDFLKSDGFANRNFMQLIHDDSLTFKEDIQKAQVSGQGDSLHEHIANLAGSPAIKKGILQTVKVVDELVKVMGRHKPENIVIEMARENQTTQKGQKNSRERMKRIEEGIKELGSQILKEHPVENTQLQNEKLYLYYLQNGRDMYVDQELDINRLSDYDVDHIVPQSFLKDDSIDNKVLTRSDKNRGKSDNVPSEEVVKKMKNYWRQLLNAKLITQRKFDNLTKAERGGLSELDKAGFIKRQLVETRQITKHVAQILDSRMNTKYDENDKLIREVKVITLKSKLVSDFRKDFQFYKVREINNYHHAHDAYLNAVVGTALIKKYPKLESEFVYGDYKVYDVRKMIAKSEQEIGKATAKYFFYSNIMNFFKTEITLANGEIRKRPLIETNGETGEIVWDKGRDFATVRKVLSMPQVNIVKKTEVQTGGFSKESILPKRNSDKLIARKKDWDPKKYGGFVSPTVAYSVLVVAKVEKGKSKKLKSVKELLGITIMERSSFEKNPIDFLEAKGYKEVKKDLIIKLPKYSLFELENGRKRMLASARELQKGNELALPSKYVNFLYLASHYEKLKGSPEDNEQKQLFVEQHKHYLDEIIEQISEFSKRVILADANLDKVLSAYNKHRDKPIREQAENIIHLFTLTNLGAPAAFKYFDTTIDRKQYRSTKEVLDATLIHQSITGLYETRIDLSQLGGDEGADKRTADGSEFESPKKKRKV

SEQ ID NO: 348 - protein, 1588 aa, synthetic construct
  REGION 1..1588: note = 08. monoABE8.1_bpNLS +Y147R_Q154R_Y123H polypeptide sequence
MSEVEFSHEYWMRHALTLAKRARDEREVPVGAVLVLNNRVIGEGWNRAIGLHDPTAHAEIMALRQGGLVMQNYRLIDATLYVTFEPCVMCAGAMIHSRIGRVVFGVRNAKTGAAGSLMDVLHHPGMNHRVEITEGILADECAALLCRFFRMPRRVFNAQKKAQSSTDSGGSSGGSSGSETPGTSESATPESSGGSSGGSDKKYSIGLAIGTNSVGWAVITDEYKVPSKKFKVLGNTDRHSIKKNLIGALLFDSGETAEATRLKRTARRRYTRRKNRICYLQEIFSNEMAKVDDSFFHRLEESFLVEEDKKHERHPIFGNIVDEVAYHEKYPTIYHLRKKLVDSTDKADLRLIYLALAHMIKFRGHFLIEGDLNPDNSDVDKLFIQLVQTYNQLFEENPINASGVDAKAILSARLSKSRRLENLIAQLPGEKKNGLFGNLIALSLGLTPNFKSNFDLAEDAKLQLSKDTYDDDLDNLLAQIGDQYADLFLAAKNLSDAILLSDILRVNTEITKAPLSASMIKRYDEHHQDLTLLKALVRQQLPEKYKEIFFDQSKNGYAGYIDGGASQEEFYKFIKPILEKMDGTEELLVKLNREDLLRKQRTFDNGSIPHQIHLGELHAILRRQEDFYPFLKDNREKIEKILTFRIPYYVGPLARGNSRFAWMTRKSEETITPWNFEEVVDKGASAQSFIERMTNFDKNLPNEKVLPKHSLLYEYFTVYNELTKVKYVTEGMRKPAFLSGEQKKAIVDLLFKTNRKVTVKQLKEDYFKKIECFDSVEISGVEDRFNASLGTYHDLLKIIKDKDFLDNEENEDILEDIVLTLTLFEDREMIEERLKTYAHLFDDKVMKQLKRRRYTGWGRLSRKLINGIRDKQSGKTILDFLKSDGFANRNFMQLIHDDSLTFKEDIQKAQVSGQGDSLHEHIANLAGSPAIKKGILQTVKVVDELVKVMGRHKPENIVIEMARENQTTQKGQKNSRERMKRIEEGIKELGSQILKEHPVENTQLQNEKLYLYYLQNGRDMYVDQELDINRLSDYDVDHIVPQSFLKDDSIDNKVLTRSDKNRGKSDNVPSEEVVKKMKNYWRQLLNAKLITQRKFDNLTKAERGGLSELDKAGFIKRQLVETRQITKHVAQILDSRMNTKYDENDKLIREVKVITLKSKLVSDFRKDFQFYKVREINNYHHAHDAYLNAVVGTALIKKYPKLESEFVYGDYKVYDVRKMIAKSEQEIGKATAKYFFYSNIMNFFKTEITLANGEIRKRPLIETNGETGEIVWDKGRDFATVRKVLSMPQVNIVKKTEVQTGGFSKESILPKRNSDKLIARKKDWDPKKYGGFVSPTVAYSVLVVAKVEKGKSKKLKSVKELLGITIMERSSFEKNPIDFLEAKGYKEVKKDLIIKLPKYSLFELENGRKRMLASARELQKGNELALPSKYVNFLYLASHYEKLKGSPEDNEQKQLFVEQHKHYLDEIIEQISEFSKRVILADANLDKVLSAYNKHRDKPIREQAENIIHLFTLTNLGAPAAFKYFDTTIDRKQYRSTKEVLDATLIHQSITGLYETRIDLSQLGGDEGADKRTADGSEFESPKKKRKV

SEQ ID NO: 349 - protein, 1588 aa, synthetic construct
  REGION 1..1588: note = 09. monoABE8.1_bpNLS +Y147R_Q154R_I76Y polypeptide sequence
MSEVEFSHEYWMRHALTLAKRARDEREVPVGAVLVLNNRVIGEGWNRAIGLHDPTAHAEIMALRQGGLVMQNYRLYDATLYVTFEPCVMCAGAMIHSRIGRVVFGVRNAKTGAAGSLMDVLHYPGMNHRVEITEGILADECAALLCRFFRMPRRVFNAQKKAQSSTDSGGSSGGSSGSETPGTSESATPESSGGSSGGSDKKYSIGLAIGTNSVGWAVITDEYKVPSKKFKVLGNTDRHSIKKNLIGALLFDSGETAEATRLKRTARRRYTRRKNRICYLQEIFSNEMAKVDDSFFHRLEESFLVEEDKKHERHPIFGNIVDEVAYHEKYPTIYHLRKKLVDSTDKADLRLIYLALAHMIKFRGHFLIEGDLNPDNSDVDKLFIQLVQTYNQLFEENPINASGVDAKAILSARLSKSRRLENLIAQLPGEKKNGLFGNLIALSLGLTPNFKSNFDLAEDAKLQLSKDTYDDDLDNLLAQIGDQYADLFLAAKNLSDAILLSDILRVNTEITKAPLSASMIKRYDEHHQDLTLLKALVRQQLPEKYKEIFFDQSKNGYAGYIDGGASQEEFYKFIKPILEKMDGTEELLVKLNREDLLRKQRTFDNGSIPHQIHLGELHAILRRQEDFYPFLKDNREKIEKILTFRIPYYVGPLARGNSRFAWMTRKSEETITPWNFEEVVDKGASAQSFIERMTNFDKNLPNEKVLPKHSLLYEYFTVYNELTKVKYVTEGMRKPAFLSGEQKKAIVDLLFKTNRKVTVKQLKEDYFKKIECFDSVEISGVEDRFNASLGTYHDLLKIIKDKDFLDNEENEDILEDIVLTLTLFEDREMIEERLKTYAHLFDDKVMKQLKRRRYTGWGRLSRKLINGIRDKQSGKTILDFLKSDGFANRNFMQLIHDDSLTFKEDIQKAQVSGQGDSLHEHIANLAGSPAIKKGILQTVKVVDELVKVMGRHKPENIVIEMARENQTTQKGQKNSRERMKRIEEGIKELGSQILKEHPVENTQLQNEKLYLYYLQNGRDMYVDQELDINRLSDYDVDHIVPQSFLKDDSIDNKVLTRSDKNRGKSDNVPSEEVVKKMKNYWRQLLNAKLITQRKFDNLTKAERGGLSELDKAGFIKRQLVETRQITKHVAQILDSRMNTKYDENDKLIREVKVITLKSKLVSDFRKDFQFYKVREINNYHHAHDAYLNAVVGTALIKKYPKLESEFVYGDYKVYDVRKMIAKSEQEIGKATAKYFFYSNIMNFFKTEITLANGEIRKRPLIETNGETGEIVWDKGRDFATVRKVLSMPQVNIVKKTEVQTGGFSKESILPKRNSDKLIARKKDWDPKKYGGFVSPTVAYSVLVVAKVEKGKSKKLKSVKELLGITIMERSSFEKNPIDFLEAKGYKEVKKDLIIKLPKYSLFELENGRKRMLASARELQKGNELALPSKYVNFLYLASHYEKLKGSPEDNEQKQLFVEQHKHYLDEIIEQISEFSKRVILADANLDKVLSAYNKHRDKPIREQAENIIHLFTLTNLGAPAAFKYFDTTIDRKQYRSTKEVLDATLIHQSITGLYETRIDLSQLGGDEGADKRTADGSEFESPKKKRKV

SEQ ID NO: 350 - protein, 1588 aa, synthetic construct
  REGION 1..1588: note = 10. monoABE8.1_bpNLS +Y147R_Q154R_T166R polypeptide sequence
MSEVEFSHEYWMRHALTLAKRARDEREVPVGAVLVLNNRVIGEGWNRAIGLHDPTAHAEIMALRQGGLVMQNYRLIDATLYVTFEPCVMCAGAMIHSRIGRVVFGVRNAKTGAAGSLMDVLHYPGMNHRVEITEGILADECAALLCRFFRMPRRVFNAQKKAQSSRDSGGSSGGSSGSETPGTSESATPESSGGSSGGSDKKYSIGLAIGTNSVGWAVITDEYKVPSKKFKVLGNTDRHSIKKNLIGALLFDSGETAEATRLKRTARRRYTRRKNRICYLQEIFSNEMAKVDDSFFHRLEESFLVEEDKKHERHPIFGNIVDEVAYHEKYPTIYHLRKKLVDSTDKADLRLIYLALAHMIKFRGHFLIEGDLNPDNSDVDKLFIQLVQTYNQLFEENPINASGVDAKAILSARLSKSRRLENLIAQLPGEKKNGLFGNLIALSLGLTPNFKSNFDLAEDAKLQLSKDTYDDDLDNLLAQIGDQYADLFLAAKNLSDAILLSDILRVNTEITKAPLSASMIKRYDEHHQDLTLLKALVRQQLPEKYKEIFFDQSKNGYAGYIDGGASQEEFYKFIKPILEKMDGTEELLVKLNREDLLRKQRTFDNGSIPHQIHLGELHAILRRQEDFYPFLKDNREKIEKILTFRIPYYVGPLARGNSRFAWMTRKSEETITPWNFEEVVDKGASAQSFIERMTNFDKNLPNEKVLPKHSLLYEYFTVYNELTKVKYVTEGMRKPAFLSGEQKKAIVDLLFKTNRKVTVKQLKEDYFKKIECFDSVEISGVEDRFNASLGTYHDLLKIIKDKDFLDNEENEDILEDIVLTLTLFEDREMIEERLKTYAHLFDDKVMKQLKRRRYTGWGRLSRKLINGIRDKQSGKTILDFLKSDGFANRNFMQLIHDDSLTFKEDIQKAQVSGQGDSLHEHIANLAGSPAIKKGILQTVKVVDELVKVMGRHKPENIVIEMARENQTTQKGQKNSRERMKRIEEGIKELGSQILKEHPVENTQLQNEKLYLYYLQNGRDMYVDQELDINRLSDYDVDHIVPQSFLKDDSIDNKVLTRSDKNRGKSDNVPSEEVVKKMKNYWRQLLNAKLITQRKFDNLTKAERGGLSELDKAGFIKRQLVETRQITKHVAQILDSRMNTKYDENDKLIREVKVITLKSKLVSDFRKDFQFYKVREINNYHHAHDAYLNAVVGTALIKKYPKLESEFVYGDYKVYDVRKMIAKSEQEIGKATAKYFFYSNIMNFFKTEITLANGEIRKRPLIETNGETGEIVWDKGRDFATVRKVLSMPQVNIVKKTEVQTGGFSKESILPKRNSDKLIARKKDWDPKKYGGFVSPTVAYSVLVVAKVEKGKSKKLKSVKELLGITIMERSSFEKNPIDFLEAKGYKEVKKDLIIKLPKYSLFELENGRKRMLASARELQKGNELALPSKYVNFLYLASHYEKLKGSPEDNEQKQLFVEQHKHYLDEIIEQISEFSKRVILADANLDKVLSAYNKHRDKPIREQAENIIHLFTLTNLGAPAAFKYFDTTIDRKQYRSTKEVLDATLIHQSITGLYETRIDLSQLGGDEGADKRTADGSEFESPKKKRKV

SEQ ID NO: 351 - protein, 1588 aa, synthetic construct
  REGION 1..1588: note = 11. monoABE8.1_bpNLS +Y147T_Q154R polypeptide sequence
MSEVEFSHEYWMRHALTLAKRARDEREVPVGAVLVLNNRVIGEGWNRAIGLHDPTAHAEIMALRQGGLVMQNYRLIDATLYVTFEPCVMCAGAMIHSRIGRVVFGVRNAKTGAAGSLMDVLHYPGMNHRVEITEGILADECAALLCTFFRMPRRVFNAQKKAQSSTDSGGSSGGSSGSETPGTSESATPESSGGSSGGSDKKYSIGLAIGTNSVGWAVITDEYKVPSKKFKVLGNTDRHSIKKNLIGALLFDSGETAEATRLKRTARRRYTRRKNRICYLQEIFSNEMAKVDDSFFHRLEESFLVEEDKKHERHPIFGNIVDEVAYHEKYPTIYHLRKKLVDSTDKADLRLIYLALAHMIKFRGHFLIEGDLNPDNSDVDKLFIQLVQTYNQLFEENPINASGVDAKAILSARLSKSRRLENLIAQLPGEKKNGLFGNLIALSLGLTPNFKSNFDLAEDAKLQLSKDTYDDDLDNLLAQIGDQYADLFLAAKNLSDAILLSDILRVNTEITKAPLSASMIKRYDEHHQDLTLLKALVRQQLPEKYKEIFFDQSKNGYAGYIDGGASQEEFYKFIKPILEKMDGTEELLVKLNREDLLRKQRTFDNGSIPHQIHLGELHAILRRQEDFYPFLKDNREKIEKILTFRIPYYVGPLARGNSRFAWMTRKSEETITPWNFEEVVDKGASAQSFIERMTNFDKNLPNEKVLPKHSLLYEYFTVYNELTKVKYVTEGMRKPAFLSGEQKKAIVDLLFKTNRKVTVKQLKEDYFKKIECFDSVEISGVEDRFNASLGTYHDLLKIIKDKDFLDNEENEDILEDIVLTLTLFEDREMIEERLKTYAHLFDDKVMKQLKRRRYTGWGRLSRKLINGIRDKQSGKTILDFLKSDGFANRNFMQLIHDDSLTFKEDIQKAQVSGQGDSLHEHIANLAGSPAIKKGILQTVKVVDELVKVMGRHKPENIVIEMARENQTTQKGQKNSRERMKRIEEGIKELGSQILKEHPVENTQLQNEKLYLYYLQNGRDMYVDQELDINRLSDYDVDHIVPQSFLKDDSIDNKVLTRSDKNRGKSDNVPSEEVVKKMKNYWRQLLNAKLITQRKFDNLTKAERGGLSELDKAGFIKRQLVETRQITKHVAQILDSRMNTKYDENDKLIREVKVITLKSKLVSDFRKDFQFYKVREINNYHHAHDAYLNAVVGTALIKKYPKLESEFVYGDYKVYDVRKMIAKSEQEIGKATAKYFFYSNIMNFFKTEITLANGEIRKRPLIETNGETGEIVWDKGRDFATVRKVLSMPQVNIVKKTEVQTGGFSKESILPKRNSDKLIARKKDWDPKKYGGFVSPTVAYSVLVVAKVEKGKSKKLKSVKELLGITIMERSSFEKNPIDFLEAKGYKEVKKDLIIKLPKYSLFELENGRKRMLASARELQKGNELALPSKYVNFLYLASHYEKLKGSPEDNEQKQLFVEQHKHYLDEIIEQISEFSKRVILADANLDKVLSAYNKHRDKPIREQAENIIHLFTLTNLGAPAAFKYFDTTIDRKQYRSTKEVLDATLIHQSITGLYETRIDLSQLGGDEGADKRTADGSEFESPKKKRKV

SEQ ID NO: 352 - protein, 1588 aa, synthetic construct
  REGION 1..1588: note = 12. monoABE8.1_bpNLS +Y147T_Q154S polypeptide sequence
MSEVEFSHEYWMRHALTLAKRARDEREVPVGAVLVLNNRVIGEGWNRAIGLHDPTAHAEIMALRQGGLVMQNYRLIDATLYVTFEPCVMCAGAMIHSRIGRVVFGVRNAKTGAAGSLMDVLHYPGMNHRVEITEGILADECAALLCTFFRMPRSVFNAQKKAQSSTDSGGSSGGSSGSETPGTSESATPESSGGSSGGSDKKYSIGLAIGTNSVGWAVITDEYKVPSKKFKVLGNTDRHSIKKNLIGALLFDSGETAEATRLKRTARRRYTRRKNRICYLQEIFSNEMAKVDDSFFHRLEESFLVEEDKKHERHPIFGNIVDEVAYHEKYPTIYHLRKKLVDSTDKADLRLIYLALAHMIKFRGHFLIEGDLNPDNSDVDKLFIQLVQTYNQLFEENPINASGVDAKAILSARLSKSRRLENLIAQLPGEKKNGLFGNLIALSLGLTPNFKSNFDLAEDAKLQLSKDTYDDDLDNLLAQIGDQYADLFLAAKNLSDAILLSDILRVNTEITKAPLSASMIKRYDEHHQDLTLLKALVRQQLPEKYKEIFFDQSKNGYAGYIDGGASQEEFYKFIKPILEKMDGTEELLVKLNREDLLRKQRTFDNGSIPHQIHLGELHAILRRQEDFYPFLKDNREKIEKILTFRIPYYVGPLARGNSRFAWMTRKSEETITPWNFEEVVDKGASAQSFIERMTNFDKNLPNEKVLPKHSLLYEYFTVYNELTKVKYVTEGMRKPAFLSGEQKKAIVDLLFKTNRKVTVKQLKEDYFKKIECFDSVEISGVEDRFNASLGTYHDLLKIIKDKDFLDNEENEDILEDIVLTLTLFEDREMIEERLKTYAHLFDDKVMKQLKRRRYTGWGRLSRKLINGIRDKQSGKTILDFLKSDGFANRNFMQLIHDDSLTFKEDIQKAQVSGQGDSLHEHIANLAGSPAIKKGILQTVKVVDELVKVMGRHKPENIVIEMARENQTTQKGQKNSRERMKRIEEGIKELGSQILKEHPVENTQLQNEKLYLYYLQNGRDMYVDQELDINRLSDYDVDHIVPQSFLKDDSIDNKVLTRSDKNRGKSDNVPSEEVVKKMKNYWRQLLNAKLITQRKFDNLTKAERGGLSELDKAGFIKRQLVETRQITKHVAQILDSRMNTKYDENDKLIREVKVITLKSKLVSDFRKDFQFYKVREINNYHHAHDAYLNAVVGTALIKKYPKLESEFVYGDYKVYDVRKMIAKSEQEIGKATAKYFFYSNIMNFFKTEITLANGEIRKRPLIETNGETGEIVWDKGRDFATVRKVLSMPQVNIVKKTEVQTGGFSKESILPKRNSDKLIARKKDWDPKKYGGFVSPTVAYSVLVVAKVEKGKSKKLKSVKELLGITIMERSSFEKNPIDFLEAKGYKEVKKDLIIKLPKYSLFELENGRKRMLASARELQKGNELALPSKYVNFLYLASHYEKLKGSPEDNEQKQLFVEQHKHYLDEIIEQISEFSKRVILADANLDKVLSAYNKHRDKPIREQAENIIHLFTLTNLGAPAAFKYFDTTIDRKQYRSTKEVLDATLIHQSITGLYETRIDLSQLGGDEGADKRTADGSEFESPKKKRKV

SEQ ID NO: 353 - protein, 1588 aa, synthetic construct
  REGION 1..1588: note = 13. monoABE8.1_bpNLS +H123Y123H_Y147R_Q154R_I76Y polypeptide sequence
MSEVEFSHEYWMRHALTLAKRARDEREVPVGAVLVLNNRVIGEGWNRAIGLHDPTAHAEIMALRQGGLVMQNYRLYDATLYVTFEPCVMCAGAMIHSRIGRVVFGVRNAKTGAAGSLMDVLHHPGMNHRVEITEGILADECAALLCRFFRMPRRVFNAQKKAQSSTDSGGSSGGSSGSETPGTSESATPESSGGSSGGSDKKYSIGLAIGTNSVGWAVITDEYKVPSKKFKVLGNTDRHSIKKNLIGALLFDSGETAEATRLKRTARRRYTRRKNRICYLQEIFSNEMAKVDDSFFHRLEESFLVEEDKKHERHPIFGNIVDEVAYHEKYPTIYHLRKKLVDSTDKADLRLIYLALAHMIKFRGHFLIEGDLNPDNSDVDKLFIQLVQTYNQLFEENPINASGVDAKAILSARLSKSRRLENLIAQLPGEKKNGLFGNLIALSLGLTPNFKSNFDLAEDAKLQLSKDTYDDDLDNLLAQIGDQYADLFLAAKNLSDAILLSDILRVNTEITKAPLSASMIKRYDEHHQDLTLLKALVRQQLPEKYKEIFFDQSKNGYAGYIDGGASQEEFYKFIKPILEKMDGTEELLVKLNREDLLRKQRTFDNGSIPHQIHLGELHAILRRQEDFYPFLKDNREKIEKILTFRIPYYVGPLARGNSRFAWMTRKSEETITPWNFEEVVDKGASAQSFIERMTNFDKNLPNEKVLPKHSLLYEYFTVYNELTKVKYVTEGMRKPAFLSGEQKKAIVDLLFKTNRKVTVKQLKEDYFKKIECFDSVEISGVEDRFNASLGTYHDLLKIIKDKDFLDNEENEDILEDIVLTLTLFEDREMIEERLKTYAHLFDDKVMKQLKRRRYTGWGRLSRKLINGIRDKQSGKTILDFLKSDGFANRNFMQLIHDDSLTFKEDIQKAQVSGQGDSLHEHIANLAGSPAIKKGILQTVKVVDELVKVMGRHKPENIVIEMARENQTTQKGQKNSRERMKRIEEGIKELGSQILKEHPVENTQLQNEKLYLYYLQNGRDMYVDQELDINRLSDYDVDHIVPQSFLKDDSIDNKVLTRSDKNRGKSDNVPSEEVVKKMKNYWRQLLNAKLITQRKFDNLTKAERGGLSELDKAGFIKRQLVETRQITKHVAQILDSRMNTKYDENDKLIREVKVITLKSKLVSDFRKDFQFYKVREINNYHHAHDAYLNAVVGTALIKKYPKLESEFVYGDYKVYDVRKMIAKSEQEIGKATAKYFFYSNIMNFFKTEITLANGEIRKRPLIETNGETGEIVWDKGRDFATVRKVLSMPQVNIVKKTEVQTGGFSKESILPKRNSDKLIARKKDWDPKKYGGFVSPTVAYSVLVVAKVEKGKSKKLKSVKELLGITIMERSSFEKNPIDFLEAKGYKEVKKDLIIKLPKYSLFELENGRKRMLASARELQKGNELALPSKYVNFLYLASHYEKLKGSPEDNEQKQLFVEQHKHYLDEIIEQISEFSKRVILADANLDKVLSAYNKHRDKPIREQAENIIHLFTLTNLGAPAAFKYFDTTIDRKQYRSTKEVLDATLIHQSITGLYETRIDLSQLGGDEGADKRTADGSEFESPKKKRKV

SEQ ID NO: 354 - protein, 1588 aa, synthetic construct
  REGION 1..1588: note = 14. monoABE8.1_bpNLS + V82S +Q154R polypeptide sequence
MSEVEFSHEYWMRHALTLAKRARDEREVPVGAVLVLNNRVIGEGWNRAIGLHDPTAHAEIMALRQGGLVMQNYRLIDATLYSTFEPCVMCAGAMIHSRIGRVVFGVRNAKTGAAGSLMDVLHYPGMNHRVEITEGILADECAALLCYFFRMPRRVFNAQKKAQSSTDSGGSSGGSSGSETPGTSESATPESSGGSSGGSDKKYSIGLAIGTNSVGWAVITDEYKVPSKKFKVLGNTDRHSIKKNLIGALLFDSGETAEATRLKRTARRRYTRRKNRICYLQEIFSNEMAKVDDSFFHRLEESFLVEEDKKHERHPIFGNIVDEVAYHEKYPTIYHLRKKLVDSTDKADLRLIYLALAHMIKFRGHFLIEGDLNPDNSDVDKLFIQLVQTYNQLFEENPINASGVDAKAILSARLSKSRRLENLIAQLPGEKKNGLFGNLIALSLGLTPNFKSNFDLAEDAKLQLSKDTYDDDLDNLLAQIGDQYADLFLAAKNLSDAILLSDILRVNTEITKAPLSASMIKRYDEHHQDLTLLKALVRQQLPEKYKEIFFDQSKNGYAGYIDGGASQEEFYKFIKPILEKMDGTEELLVKLNREDLLRKQRTFDNGSIPHQIHLGELHAILRRQEDFYPFLKDNREKIEKILTFRIPYYVGPLARGNSRFAWMTRKSEETITPWNFEEVVDKGASAQSFIERMTNFDKNLPNEKVLPKHSLLYEYFTVYNELTKVKYVTEGMRKPAFLSGEQKKAIVDLLFKTNRKVTVKQLKEDYFKKIECFDSVEISGVEDRFNASLGTYHDLLKIIKDKDFLDNEENEDILEDIVLTLTLFEDREMIEERLKTYAHLFDDKVMKQLKRRRYTGWGRLSRKLINGIRDKQSGKTILDFLKSDGFANRNFMQLIHDDSLTFKEDIQKAQVSGQGDSLHEHIANLAGSPAIKKGILQTVKVVDELVKVMGRHKPENIVIEMARENQTTQKGQKNSRERMKRIEEGIKELGSQILKEHPVENTQLQNEKLYLYYLQNGRDMYVDQELDINRLSDYDVDHIVPQSFLKDDSIDNKVLTRSDKNRGKSDNVPSEEVVKKMKNYWRQLLNAKLITQRKFDNLTKAERGGLSELDKAGFIKRQLVETRQITKHVAQILDSRMNTKYDENDKLIREVKVITLKSKLVSDFRKDFQFYKVREINNYHHAHDAYLNAVVGTALIKKYPKLESEFVYGDYKVYDVRKMIAKSEQEIGKATAKYFFYSNIMNFFKTEITLANGEIRKRPLIETNGETGEIVWDKGRDFATVRKVLSMPQVNIVKKTEVQTGGFSKESILPKRNSDKLIARKKDWDPKKYGGFVSPTVAYSVLVVAKVEKGKSKKLKSVKELLGITIMERSSFEKNPIDFLEAKGYKEVKKDLIIKLPKYSLFELENGRKRMLASARELQKGNELALPSKYVNFLYLASHYEKLKGSPEDNEQKQLFVEQHKHYLDEIIEQISEFSKRVILADANLDKVLSAYNKHRDKPIREQAENIIHLFTLTNLGAPAAFKYFDTTIDRKQYRSTKEVLDATLIHQSITGLYETRIDLSQLGGDEGADKRTADGSEFESPKKKRKV

SEQ ID NO: 355 - protein, 4 aa, synthetic construct
  REGION 1..4: note = synthetic peptide sequence
SGGS

SEQ ID NO: 356 - protein, 24 aa, synthetic construct
  REGION 1..24: note = synthetic peptide sequence
SGGSSGSETPGTSESATPESSGGS

SEQ ID NO: 357 - protein, 32 aa, synthetic construct
  REGION 1..32: note = synthetic polypeptide sequence
SGGSSGGSSGSETPGTSESATPESSGGSSGGS

SEQ ID NO: 358 - protein, 104 aa, synthetic construct
  REGION 1..104: note = synthetic polypeptide sequence
GGSGGSPGSPAGSPTSTEEGTSESATPESGPGTSTEPSEGSAPGSPAGSPTSTEEGTSTEPSEGSAPGTSTEPSEGSAPGTSESATPESGPGSEPATSGGSGGS

SEQ ID NO: 359 - protein, 24 aa, synthetic construct
  REGION 1..24: note = synthetic peptide sequence
SGGSSGGSSGSETPGTSESATPES

SEQ ID NO: 360 - protein, 40 aa, synthetic construct
  REGION 1..40: note = synthetic polypeptide sequence
SGGSSGGSSGSETPGTSESATPESSGGSSGGSSGGSSGGS

SEQ ID NO: 361 - protein, 64 aa, synthetic construct
  REGION 1..64: note = synthetic polypeptide sequence
SGGSSGGSSGSETPGTSESATPESSGGSSGGSSGGSSGGSSGSETPGTSESATPESSGGSSGGS

SEQ ID NO: 362 - protein, 92 aa, synthetic construct
  REGION 1..92: note = synthetic polypeptide sequence
PGSPAGSPTSTEEGTSESATPESGPGTSTEPSEGSAPGSPAGSPTSTEEGTSTEPSEGSAPGTSTEPSEGSAPGTSESATPESGPGSEPATS

SEQ ID NO: 363 - protein, 5 aa, synthetic construct
  REGION 1..5: note = synthetic peptide sequence
PAPAP

SEQ ID NO: 364 - protein, 6 aa, synthetic construct
  REGION 1..6: note = synthetic peptide sequence
PAPAPA

SEQ ID NO: 365 - protein, 7 aa, synthetic construct
  REGION 1..7: note = synthetic peptide sequence
PAPAPAP

SEQ ID NO: 366 - protein, 8 aa, synthetic construct
  REGION 1..8: note = synthetic peptide sequence
PAPAPAPA

SEQ ID NO: 367 - protein, 9 aa, synthetic construct
  REGION 1..9: note = synthetic peptide sequence
PAPAPAPAP

SEQ ID NO: 368 - protein, 15 aa, synthetic construct
  REGION 1..15: note = synthetic peptide sequence
PAPAPAPAPAPAPAP

SEQ ID NO: 369 - protein, 21 aa, synthetic construct
  REGION 1..21: note = synthetic peptide sequence
PAPAPAPAPAPAPAPAPAPAP

SEQ ID NO: 370 - protein, 412 aa, Homo sapiens
MPIMGSSVYITVELAIAVLAILGNVLVCWAVWLNSNLQNVTNYFVVSLAAADIAVGVLAIPFAITISTGFCAACHGCLFIACFVLVLTQSSIFSLLAIAIDRYIAIRIPLRYNGLVTGTRAKGIIAICWVLSFAIGLTPMLGWNNCGQPKEGKNHSQGCGEGQVACLFEDVVPMNYMVYFNFFACVLVPLLLMLGVYLRIFLAARRQLKQMESQPLPGERARSTLQKEVHAAKSLAIIVGLFALCWLPLHIINCFTFFCPDCSHAPLWLMYLAIVLSHTNSVVNPFIYAYRIREFRQTFRKIIRSHVLRQQEPFKAAGTSARVLAAHGSDGEQVSLRLNGHPPGVWANGSAPHPERRPNGYALGLVSGGSAQESQGNTGLPDVELLSHELKGVCPEPPGLDDPLAQDGAGVS

SEQ ID NO: 371 - DNA, 18793 bp, Homo sapiens
  source 1..18793: mol_type = genomic DNA
gactcccaggcccgaggactcctggaagggaggtgagtgtggcgctgaggaagcggcgggacggatgcgagcccgggaggagcgcgctggggggccgcaggcgggggatgtggcgcggtccaggcccgtcgcggcctcgtcctgacagggacacctgcgggatcgtccttccaggatcgcctgcgggcctcgcgggccgatgcctcgggtccccctccggcctcggtttctccgcgcagcggggcggggcgggggcagcgcgggtctcaaagctgcctgcagggggcgcccgtgagcggcgcggccggagccggagacccagcggccgccgagacagcgggagccggcgtgcgagcggcaggtcagccggggtgctaggtctggcgtgcggggtcctgggtgccgggtccggggtgcggggtgccgggggtccggggctggtggccgggcggcgtggggccgtcgggggtgcggggccgggaggactgggaggctggggttctgctcccctcagggttcctttcccgccgccccgagaccagttccccggcgcggggtccgagtcctgccccgcggcggctgccggcactgcctgtgaagggcccaggcacagtcacgtcccaggcgcagttgcggcgccgcgtgcgggaccctccgagctgtcccaaactgcaccggaaggcgcgcaggggtaggcggggagggaaggcaagtgcggcggccggcgcggcgcggggtgcggagccgcaggtagcgggcggggagcgtccgtccgtcagtccgtccgtccgtccatgcgccgcagaccggccccgcgcgctcgcatgaaccttcgcgagctcctccagcagggatggaccgggggcgcagaggcgcttcctgaggggtggcgggccgggccccggggcgagggagattccccaggtggaggagccgggcggagaccggttccccgggaaggtgaggcgcgggcagagatacccgagcgcccgggacgcgccgagaaagggggaatcaggaacgctgggccgagcgctggcgtcttccgtggacagtggtggcgggaactgggtttgggggacccaggagacgacgggggacggatgggggtgggtgcgcgcctcggactggccccggccgtctgtctggctgcccggagcggaggtaggaatggcgggaatggtggcggctctcgagggatttggcgcaaggcggcccaagggcttgaggaggaggccgcgggccggcagagctgaggtccctgtgtcccgcactcagactttagttgccccgactgtaccatgggaggaagagggagacccagggctgggtcctaggctgggggagtcggggccctgcaaagacgcgcaggtgtttgtggcccttgttggagggtgagccgcaggtcaagccagccctccgtcgccatcctgaagcacctcctctcttgggctctgccacacacagggccttctcccctattgccaggtgctcaggccgcctccaccctgcctctgctgccggctccccctgggttccccggcggggcaccctgccgatactccatgacgcgccagggctgccccagggtgccccagccctggggaccatggtggagggttctgtggagcaccgcgggcctgggaagctgttgcggggtcggggcttcctcactggccctgctttggccgttcctggaggccttgggtggggctgggaaggccgggccctgtgggcagcaccccccccccccccgcccaacatcccggcagatccatggcaggggcgcctcacaggctggtccacggccacggtgtcagtccctccttgttctgcgcttgctttttggggtctcccagcctctccctagtcctagagtttctcaggcaaatcccagccactacccctccatccgtgtcccctgtttccccagtgctgagctggctgagctgtgagctttcctgctccttgcctcaggaagccaggggcagcccagtcacctctggccagaggcgggccttaggccaaggctgacctggctggtctgagagctgtgctgggcttcttcccatatcagtctgtgaattacagatccccaaatatgccctgcgtcgcgatggaggagggcaatcaatggcaatgactgcctcatgggcaacgcgatgtgctggagatttcagtgctctcgtctgggttctggtcttgcctcctcgacccactcgctgagcaggttgctgtcccggggaatctgatatctcatctgtagaacaaggatgatgatcttagcaatgcctaatgtggaaaggccttggcttgggagcaagtgggggaaggtttagggcagaccagagggccggtgaggggtgtgtgctggagcggggaacccgggagggagggtgttaggcttgagggtcaggggacaccacagggattgctgttggcagagggacatatgaatggtagttggcctgggagccagcatgtgacttgagagcatcacgtcctgcaaagtccaggtgaggcctgggcagtgcctgctgtgtgggaccacagcccctggtggctctcagctgtgtcctgacactccaaagaaggtcttagtaccctctcacagacctaatacccgagccacctaaccccaaatgagctagaactgccttcccaaccgtgtttgcggggtctgtcttgtctattgcagcgcaaacagagccctgagcacgcaggagagcagaggaaggacagacagaagatggatggatggatgaaggcgggaagcacaggctgaggggatttagggcatgtgtggtgggggtgctgtggagaggagactgcacaggcaggagctgagctggtgaatgggagggttctagctcccagaagggtctgggccattgacaggaggggcttggtcctaggaggtgggtggtccagaggttgcaaggagcagaggagcccagatggggaagggaatggagctggggtgcagagaggagcccccacacaactgcccacatcctgtgcagaacctggggctctgggtggtgggaagaggcagtttcatggcggaggaggcctgggcccctgcagcctggactccatggatctggccagggactggggaggatcaggtggagagaggagcagcagagcagctgcccctcgtcccagcacaggggatgatgggagcccagggaaggcaggaccctggcttcgggcattttctctgctagaatctctcgatacctctctcccttcaccttctcctccaagtctcacccagatgatgtttctgtgagttgccatggggattctctcaccaccccccgccaacaccccgcaggggaagcttgttccaggagtcactgggcaggggctgctgctgctcttctgtgcccactcctcggatgtgccgctgcagccctggtctctggcatcggccgtcacctggtggagaggctgccggagctggccaagcagagggaggccgatggtgccacttggtgtctcctctggcatctgggcaggagacttctccccagaggccccgggctggtctgcccgtgtcacaggaggactcgcctctggtccctcagtggcctctgcaaaccctgagccagcctgggggaggctgctcagtggggaagaagcagtggccaggctctgcttggtcaccctgccctcctgtcagcctccggggctgcctcgtcgcacctgcccagggacccaacagccggtcctcacccctcccatcctcattgcagccaccctggggcattgtgaggccctgcacccagcactgccccttcaagcctcccacagggtcccgcccaggactcctgggctctgtgtccgcggggccatctagaaacactcccttgtccccccttcagcggcatagtacctgttgcccgccatctgagggaggtgcaggtgccaatccttcacgtgacgtgacgtggctcaccacagcctgtgtacatgtgagcagccgcgtgcagaggggaagctctgcctgggcctcagggactgtgacatggagcaggagccgcccccagccaagctgctttcagcacagcgtgggcccccagcaccttggtgcggggtgcggcccctcggaggagggctgtcaggtgaagcctcgtgtgagggggtgagtggcccccaggcggggaggagggggtgctgtggccttcctggcccctagcctggacacatgggggtgtggggagcaggagctggggcccccagcactggccccggggctgcgatgtgggggctgctctgtgaggcaggctcagagccttagcctccagctgcagggagctgggtcttggccccatcttgcccacatcctgccaccaggagcagagagctgcagctgcacccgggctgtgggggagggatgccaggtgtatctctgggtcccgggcccagcctgcacccagcgcctgaagtaagggccaccgggcagccccggaggtcaggagggaagtggagcccgtgctgggtggctgcttaccactgggcagtgaggaaggcacctgcgctgatgagtttggaaggggtatggggatcctggggccctgggttctgggaggttcatgcccaggcccccctgggccatcccaaaagccagtcatagtggggcccacaacctgccgtgccctgccgagctcccgcaagccacttgttgatgcttctcagtccaccccatgcctctcaaccgtttcctcctagactaggtctcttcatggcgtttctgggagaattcctcagtactagcttcagatccccagtcgtctcttccactgtacgtgtgcctgaagctcaccacatcccttacttcagtccttctatttttcagtccctggattttgtattatttcttgttcatatccacctgtccttgtttcatttccgccagtcggttcagaagttctcattcttgtctacggatgccattcctttctttgcctctttggagattctaaaggtctctgaaatcattattagattactgtattaccttccttcctactggaatgaattcacctccatgttttttattctgttgcttacctttcttagccttcatatacctcttgcgctttgaaattgatttgcgactcctcttagctgagccaatgttgtggagacagggagtggcctgcagtgcctgaaactgcagggcagcagccgcctcccaggaatgtcctgggtcctttcctcctttgaggtcccctgccatatgctcagatggggccaggcacagcaacgggggcacacctccctttggcccagcagttggggtgctgccaggcctggtggaggtacttggtaaacatttgttatggaaaagcagcaggagggttctaaggctgggattctggagcccaggaacaggccaggcatggctggagcgggtccgagtccgtgcactgtgtcctgtatgttgctcttagccgcactcaggagcagatgtgcaggtcactgcctagaagctggtgggcacctccgtgcagcaggctctggggggtatagccaccatctgggcatgtgtacagagggccttgctagtgcgacatatgaggaaccagaagatgtgtgggttttgattaaatggagttttaattaaagtggccaggttgggggaggtgaggaggaaggcaggaagcagcagcagttttgagtctgaccgcgtggaatcctataaggtggttctttcaagaggcattatgcacattccgcagcatgtgtcccctgtctgtatggggcagcatctgccctctgatctgtccccaacaaggggtaatcacagagaagtattacattattaatatttaatttcccctcctggttagcaacagatgactcaaggagtaattagatgcacagagccaacagagagggataggaaattgccagatcctggccccgccccctccccggggcctctgaccttcctgtcactctgggaggcttctgagggaggggagctggaggcccaggagccttcctgctgctgtgctctctgtgcgcacggccgcagccctacaccaccttccagtgctcttggtgaggctgagagaggtcgcttcgtgcctttgggcctcagtttcctcatctgtaaaatgggcttcctgggaccagcaagatcacagatgacagtcatttcccaagctcctaagcaggctgcacaagctgtgtctgagggtccagtgcagtgcctggcctctaggcaggtgccccctgggacgcgtaaggtttggcagctcagcagtgactggcatcgtggccagctgactctgtgttgctccccagttacggtccacgacacattagtagcttgaaactgggcacaaggggagaatttacaccacagaaatcaggcaaagcctgtaagtcagggtgcccccggccaggagctgatttgccagcctacggctgggtagctcccaacctttccccaatgaatgcactcctcttcccctgtctgccccaaaggtgcctctgactccactgatctgctttgctcagggccgagaaaggcacagctgagagtggattctggcttggcaggggcccaggttgcctgtgggtccgggcaagcctcacccgggatgtgctggcagcagctgggagagcctgcaggagtgcttaaggaggggctgagggagaggacgggcagcgaggtggcctgtgtggaccctgctggcaggagccgtgggtgtctttagccccgtgtgaggccggcctgggcagaggggtctgttgctgtcactgaggctggtgggcagcaggaaggtggcttcagtatagtcaagaaggttatcggtatctagtgctgtttagcatggggacccacagcacagaaggtggggagaccctgagaacgggggtacacaggcaggtacccagggctgccagggaagccttgccaaacagaggccctggtcaggcttctcccaaactgggcatcccagctggcatggcaccagtccagcccgtgaggcaggcgccgatgatttgaccccaccagcagggctctgggtgatgggactggggagtcctccttcactttggcagacgtgttatgttccaccttgtttgcccccagcaaggcccttgaatctggagcgtggtctggggctgcatcagccttctagcctgggatggtcagattggcagaaggctgtggcatccttcaatgcagatgccctagagagggccgtggtgggaggcaggatccctgggtagaggcggctcctcagtggcccactgggcctcactggacagtcgcctgttgctgctgctggtggtgctgggcctgggagtccaccttggagccacaggccaggcacctgggtgggaggcagcccggggccagcaccagctccacttgtacctgttgggcaggggctatcgtgagtcaggtgggccctggtgagtactgctcagggagagaggccaagagcatcagggataactgtgttccttgagtgtggccagggatggtgccaggagagctggtctggtgcatccctgccaacgacacactttgtgaatggctgcctggcaagtgctccatggaaagcaggggcttgggaggactcggccctctccagctgctgcaggccctccgttgctgcagggtttctggctctgctctctccttcctcctcctgcttctgtgtcaatgctccattcccaggctcctagtaggggcaaaagggcctgctgggtgcaggagaacctccagtcccaggtatggctgcagcccgtgccaatcctgttccagccacttgaggtgccgacagcattggagttggagggaaagttggggtctgtgtgtttgagctctgtcacatggacaatggggtagaggggagcctggccctttgaacagggctcaggaccaggagtgacttcctctccaggttgccagtcctgctccatccctcatgtcctggaagagagagagagacgaggtggctgcccgagtccacgtgaaaggcagcctctgacctcttgtccccaggcaggtggtggcggctggcaacacactcatagggccccatgagggttcaggattggagggggtagatttgggggcctcttagctctcaaagaggggcaatttaacgggcagaggtccatttggatccagaccattcacaggctcgaaggggacactgggagttggggctgggctcaggcctgctggggaaccaaaacttctgcttctgaggggtgtcagtaattccattttgactctgggggagccattttaaatctgtttatttccttctcatagaatcatgggtgagagctggcatggcccctagaggtcatttggggtccagctgcctcaccgtatcaatgaggaaactgaggcccagaaaagaaaagcatttttgcccagagtccctcagtgagtcctggttccgtacctgctttctgccagggaccaaactcccgttagtcattcctggtgtcagccaggcagaggagcaggtgggggagagggcgtgggaggagggaggtgaggcagctccctccgagtggaagctcacagtcagctgcagcgccgcccctgccctgactgcagctgactggcaggggcacctggaggcagcgggttcgggcgcagtatgagagggcttaccctctgcggcagtgggagacaggaccaggcagctccccacatccttccacatccgagctccaggggtctctggcttgtcctttcacagggcggctggtgtcccttaggtgggtgctggtagttcctgggagagttgacgggatggagcaggccaggggggctgagaagttggcctggcgagagaaggtgggtgggactgggagagcctgggcagggaggggcctttctgggagggagtgtcatggggctggccgagatccaggacccaggagactggccaagctgccacaggaggcctgagaggctgagcatgggggggccaacactgacagactttaacaagtttctggctcccccaggaaaaaaacagaccacatctgatccttggccctgagtccagagtgggaggcaccgtgacaacaatgcgcagagcagggaatgcagggagccatggatagtgctggggtgagctggagtcctggcaggggcccagctagggcagtactcattctgcagagcctgggagaaggggctgcctccttgggaggggtttgtgtgggagtctcagcgggaattctattggaccaggggaaccagccttgctcagtgacttctctgggtgtcctcctctaaagtgagggtcaaattcccacctctctcgcctcctggctatgaccacagcagaccaggcagggcatggggctaggcggggtcaggggccatcctcaggctgacacctggcctgtgggtagggtgggatctgaaactatagggtcttcagggggccaagtgtggggtaaggggtggcactttccgcagggctcgccctctgcagatggttcagcttctcatcggctgtccctttgcaggtgcctcaggaaccctgaagctgggctgagccatgatgctgctgccagaacccctgcagagggcctggtttcaggagactcagagtcctctgtgaaaaagcccttggagagcgccccagcagggctgcacttggctcctgtgaggaaggggctcaggggtctgggcccctccgcctgggccgggctgggagccaggcgggcggctgggctgcagcaatggaccgtgagctggcccagcccgcgtccgtgctgagcctgcctgtcgtctgtggccatgcccatcatgggctcctcggtgtacatcacggtggagctggccattgctgtgctggccatcctgggcaatgtgctggtgtgctgggccgtgtggctcaacagcaacctgcagaacgtcaccaactactttgtggtgtcactggcggcggccgacatcgcagtgggtgtgctcgccatcccctttgccatcaccatcagcaccgggttctgcgctgcctgccacggctgcctcttcattgcctgcttcgtcctggtcctcacgcagagctccatcttcagtctcctggccatcgccattgaccgctacattgccatccgcatcccgctccggtgagcagggccggggttacatctgtgcaaaggctgttggtgcccaggctttggtctgtgcccggagccagggtgagcctgggatcagggcctggtctgcagtgtcagcatggtgagctggcgacggggccccaggctcagcaggggctccccagggccagcacgtggccagcagtcatgccgaactgactgacccctatgggcgcagggcagcctggccctcccaggcggcctgggttcccctaggctgcctgaggccaactgtgctctgctttttggcagatgagtgtggccagggtctggcattgggcttagcagggagctgtggtcccagtgacccacgtgctgccagcgggtgtgtctgggccattcctcacacacaagcaaaacttcccggatgatgctggggtggagtggggagccaggggaaaccataggacctcagagttaggagccgcccgccacctgccttcccccagatcctctgggccagccttgcagtgtgcacattaggaaaatgacccagagaggggaagtgacttggttgaatgccacagtgagtcacttggacctatatgcaaattctgttgctcctcaagtcaccaaggactcatcgtcttagaggcagccagtgtgctcaggggctggctgttggaggggatttttatggtgaatcttttgtgaagtgacttcagccaagtaattgtgcaaatgaagattttcccagaggctgaattactcggcatggattccacctacccaggccatagatgaggctagaaagtgcatccctcccttggggacgtcagaggccttctgccccacctcctggcccctctgccacagagctgggttccacagcctgggtggttgtgggccctgaggccatgtatgaggcttgaggtggtgcctcttgagagtcagggagcagggtgcaccatctctgcggtgaattatctgaaactggtgggtgcctatctaaagaggaagccacagcaggttgagggtgccccagcaggaaggaggacccagctagatgagcaaatggaaatttagagcgtcaaagccaaggggcccttagaggtcatttcctctcatcttcgggatggaaaatgagcctcagagaagacagccagctgtttccgggccacacaacgagttggtagtggagctggggcgagtcctggaaagaaatgtggcctgatccccactgtgacttcagtcactggggagcggtcatgagcagcctgtctcgcagagcctgcaccaggtggctgtccctgtcacctgggctctaagtgggagcaggagctgcactgggctgctccagggaaggggaggaatctggacctcacactgccctgtcagatgctctctatcccaggagagtctagaaccctcggcaaaggagaaggggaccctggccagccctgagaggggtggaattagggattgtcggactccaagtgcagtctctggtgagcctccatccattgctctgcgacgggcagagcagagtttaggttcgtccagtggcagctcagaacacggaggcccaggaggggccctgtctgcaggtgcccaggtgggccagagaacaaagcactggaggggacttcagggaaccaagctgagtctgcacactgatgggatgctctatggggaagcagaggccaagctctcacttttttctctgattcaaagggtatgatcagggctgccgttctcaatttaaaggagctcgactttttttctcttttgtctctccctttccttctctgttttctgagagttgagagaatgactccctatgtagtaggacaggatgtgctgtgtggctatggaaagttagctgcctctctctgggcccatttcctcatccataaaataggacaagtctctctgcccctctgagctcacaaaggtgttctgaaggtccagtgagtggatggggtgacagggaccctgaggagggttggaggcgtggggagggtggggattcagatctttgggttcagagccatggacctgccccctatcctctacccatctcatcccaacttccttggagctggaccttagttccacccagaccttgagccatttgactctgctccatgaggctctgcaaggcttaggctggtctcttctgcagggggccctggagaggatgacgacgatgatgttcatcctcccttgagggcagagagctttgcagttgccaaaggatgtcagctcagcatctcctgtcatcctcttggcctgcattgtggccaggcggatgttctgaccctcctgttactcacaaactcatggggaggccagagcagggaaggacatacgagtgtctcctgatgtggatggactccagggcccttcaggctgttcctggcccgcaggtcccttcgctttcctgttcctcagggcccctgggcctctgggcatgtggaggtgtccatgtgggctcccgagagcaagcggggtatgaaaggaacttggtgacactcctggccggcgctggagtcacagcctgcctcaggatcctccctcctcctttctcagctgggaatccagcctcctctacgtgccgtttcctgctccactcagaaaggtccattcggctagccctgggtctagcctcaggcctgccccactctccattaactttttttttaaaaaaaagaactcagttttggaaaaatctgttattttccaagttcagggaacctgttgggctagcacagggcctagtcgaggaactctgtgagaaagacttcaggccagaggcagagatgtagctctctgtgttcccagaggatagggaattcagggtgagagacacaggcttctttttccagttcccaggggatttttgcctcactgtcccctccctggctctcacagcagcccttggtggatgttctcgctggtttgaggaacaggccaaggtgcaggtggcagctggtggtgaggcccgaagtcctaacacttctaagagggcaggattgggagagagggctccctggaggaggtgtcacccagtgggtcttgcaggacgggcaggcagggtctcactggcatgagtgtgggggcaggtgtgtcaggaggggggcaaagcctgggacaagaccctgaggaaggaatgagcatgtgagcactgggtagggaagggtggcctggctgcctagtgacagagagagatgaacagagtgggcaggaaaggtggaggccaagtcaggcctgttcgtaccaggggaaggaatggaggtttccctgtgggtccatggctcttcaattcttggatcaatgactcctttggacaacttaggaaggctccacctactcctcaggttgggacatgtgcacataaagccccagctggaatcatggggcatattcttggaccatagggtgagcccccagtgtgggtaatggagatccccagaaaggggcagcctgcaagccgggggacacagagctgcagagggcacctccacaaagggtgggcagcagctctgggacccacattctctgacatgcctgggcaccccagagtggtggtgtgtcacgctagacagccttggcatcccttccagctggatggtcaatgtttggggtctaagacggcaagatgtgagtgtgttggtcacagatgcagcccaggatatgctgctgggcctggctgaggctcagctgtgattccatttgggccctgatgctgtccccaccccgtgggcaccagggtccagggctctcagcctatggagatttcttttgaataaacttagtctatttgcaatttaagaaaaaaaaaagtcatgttttgcccactctaaaacattaaaaaggaacaaaagagtatagtatagtagaaagttgtcctccataccccctgtcccccaccctcagttccctgcctgcaaggccatgttaagaatccttccagagatattctttgcatatataagcaagtgctattaatgtatgttttgtttctgtccccacacgggactttctttgcagagtacggtggaagactccccttgtgggttcccttttctgtacaagtcaacaattggacagaccagggatttccatactgtgttcccagaagccttcgggttggctctggtgtccccaccaattcactgattcaataaacatttaataagccccttcccttccccagcagcttcacctctgtgactgcctgggaatgtgggcgacaaggtttgctgctgagaacagtttgaaaaccagcaaagcaggtggcccagggcccaggcagctctgcaacacccctgtggctgcttggctctgctctgttgcctcaaatgacaggaaactcactattgcctgaggcaggccatctctcctgtgaacagctcagctgaaaaactcttaacctaccctgagttacaatctgcctccctataatttccacccactgattctccattctgcccttagagggcagagtgctgacaggtccacgacttggtcccattttacaaatgaagaaactgaggctcagagagacaaagttttaaaacattcctgttaacagggccagaacccaggaagggatatgcttttctcaggaataatgtcaaaattaatatagcttcccagtcaatgaggactatataaattactatttgcaaagcactaagaacagtgtccggcacagagtcagtgctatgtaatgtagatgtgagaatgagagagcctgagattttatgtttgcgagtcccacaggaggcagggcaatgccaactccctgttgcttggaagcaatgggcaagtctatgaccctcctgttgaggccctgttacaggtaaccaagcccccacggaatggagctgaggagctcctgagaatgggcttgtccggttactgtttggattcagaactgacctaagagattcagaacagacagactcgccttggcctgagttgcctctgggctcttggaatgtccacagcaagtccattcctctccttgggcctcaatttacccacctgtaaaacaagaggattggaccacataagagatcggaagccaccagggtttctctttttctcttttatttgaattagttgacaaaacttaaatcttgggagattttacccagaaaatcatctccccagccccacctgagatctggtaatagcaggcgtacgttttgcatggcgctgaagaccaggtaaacgccccaccagctgcctcctgtgtgtgctacctataggcgcctgtttgctacccgtgaatgagatggtttctgtggatgttcccagctccgcagttaagtagagcacatccttccccttgcacctttttttttttttttttttttttttttttggagactgagtcttgctctgtctcccaggctggagtgcagtggcgcgatcttggctcactgcaagctctgcctcctgggttcacaccattctcctgcctgtctcccaagtagctgggattacaggcccccgccaccacggccggctagttttttttatttttagtagagacaaggtttctccatctcctgacctcgtgatccgcctgcctcggcctcccaaagtgctgggattacaggtgtgagccactgcgcccggcctccttgcaccttctgagtgtccctgtctcggagctggcaatgcagagatggatgtaggaaagccctgcccccgaggggcccagatgtggtggggatctgctgcacttcggtaggaaacttctttgagatctctatcctggacttgaaggatgggtagggtttctgccaggtagaggggagtgtagtctggtcttgccagaatcaaaactgttaaacagaagtcatccctcagtgatcatcaaggttgccttcctaaattagggagactttttttttttattgtccattctttcatgaaatctaggccacctttcctacagggctgaggtctgcttactggctggcagatccagccatttcccgagtatgagactgggagtcggtaggcttggatttctgtctggctctcactcaggaagactgagtgatttcgggcagattactgtccccctggacctcagtatttccttgcaaatgttaagatggccatgtaaatgttaacaagtaattctctcatttctctccagagggctgtgggtgggtttggaggggagaaatggcatctcctttggcctgggacctcctcccctcttttaccctccatgctgcctctcctcaagggcttctggagtccccaagtcaaatggcaaatggggaagagaagacagggtatggagtacaagaggcctagatcctctataggtctgatctggctggtgctgcccctagccagtaaagccaccctccagaccccttcaagcctgttgtagccttaaccaagatcaaccaacatggaggtgactgatcttggttaaggctgcgaccaacatggaggtaattgatcttggttaaggctacgacacgtttccctttagagaaaaatcatgttttccccctcaaaaaatcatgcgttaatttcctccaaccaaactaagtcccaggactactccgaaaactactcaatgaccatctgggcatttgtacatgggtttccatttcttggatgcctgctctcctgttacctcccagaagcctgtgaaaaaggcaaggcatattacttccacttaacggaagaggatgctggggcgaggtggcaggaaatgactggtccaagaccttacagtcaggaaatgtggaaacgggtgctgctctggggttctgaactcttggccctgcttaaccctggcttctcagatctctgatgctggtctcttccattgctgtgctggccatcctgggcaatctccccaggtacaatggcttggtgaccggcacgagggctaagggcatcattgccatctgctgggtgctgtcgtttgccatcggcctgactcccatgctaggttggaacaactgcggtcagccaaaggagggcaagaaccactcccagggctgcggggagggccaagtggcctgtctctttgaggatgtggtccccatgaactacatggtgtacttcaacttctttgcctgtgtgctggtgcccctgctgctcatgctgggtgtctatttgcggatcttcctggcggcgcgacgacagctgaagcagatggagagccagcctctgccgggggagcgggcacggtccacactgcagaaggaggtccatgctgccaagtcactggccatcattgtggggctctttgccctctgctggctgcccctacacatcatcaactgcttcactttcttctgccccgactgcagccacgcccctctctggctcatgtacctggccatcgtcctctcccacaccaattcggttgtgaatcccttcatctacgcctaccgtatccgcgagttccgccagaccttccgcaagatcattcgcagccacgtcctgaggcagcaagaacctttcaaggcagctggcaccagtgcccgggtcttggcagctcatggcagtgacggagagcaggtcagcctccgtctcaacggccacccgccaggagtgtgggccaacggcagtgctccccaccctgagcggaggcccaatggctatgccctggggctggtgagtggagggagtgcccaagagtcccaggggaacacgggcctcccagacgtggagctccttagccatgagctcaagggagtgtgcccagagccccctggcctagatgaccccctggcccaggatggagcaggagtgtcctgatgattcatggagtttgccccttcctaagggaaggagatctttatctttctggttggcttgaccagtcacgttgggagaagagagagagtgccaggagaccctgagggcagccggttcctactttggactgagagaagggagccccaggctggagcagcatgaggcccagcaagaagggcttgggttctgaggaagcagatgtttcatgctgtgaggccttgcaccaggtgggggccacagcaccagcagcatctttgctgggcagggcccagccctccactgcagaagcatctggaagcaccaccttgtctccacagagcagcttgggcacagcagactggcctggccctgagactggggagtggctccaacagcctcctgccacccacacaccactctccctagactctcctagggttcaggagctgctgggcccagaggtgacatttgacttttttccaggaaaaatgtaagtgtgaggaaaccctttttattttattacctttcactctctggctgctgggtctgccgtcggtcctgctgctaacctggcaccagagcctctgcccggggagcctcaggcagtcctctcctgctgtcacagctgccatccacttctcagtcccagggccatctcttggagtgacaaagctgggatcaaggacagggagttgtaacagagcagtgccagagcatgggcccaggtcccaggggagaggttggggctggcaggccactggcatgtgctgagtagcgcagagctacccagtgagaggccttgtctaactgcctttccttctaaagggaatgtttttttctgagataaaataaaaacgagccacatcgtgttttaagcttgtccaaatgagaa

SEQ ID NO: 372 - DNA, 2529 bp, Homo sapiens
  source 1..2529: mol_type = genomic DNA
gaagctctgcctgggcctcagggactgtgacatggagcaggagccgcccccagccaagctgctttcagcacagcgtgggcccccagcaccttggtgcggggtgcggcccctcggaggagggctgtcaggtgaagcctcgtgtgagggggtgcctcaggaaccctgaagctgggctgagccatgatgctgctgccagaacccctgcagagggcctggtttcaggagactcagagtcctctgtgaaaaagcccttggagagcgccccagcagggctgcacttggctcctgtgaggaaggggctcaggggtctgggcccctccgcctgggccgggctgggagccaggcgggcggctgggctgcagcaatggaccgtgagctggcccagcccgcgtccgtgctgagcctgcctgtcgtctgtggccatgcccatcatgggctcctcggtgtacatcacggtggagctggccattgctgtgctggccatcctgggcaatgtgctggtgtgctgggccgtgtggctcaacagcaacctgcagaacgtcaccaactactttgtggtgtcactggcggcggccgacatcgcagtgggtgtgctcgccatcccctttgccatcaccatcagcaccgggttctgcgctgcctgccacggctgcctcttcattgcctgcttcgtcctggtcctcacgcagagctccatcttcagtctcctggccatcgccattgaccgctacattgccatccgcatcccgctccggtacaatggcttggtgaccggcacgagggctaagggcatcattgccatctgctgggtgctgtcgtttgccatcggcctgactcccatgctaggttggaacaactgcggtcagccaaaggagggcaagaaccactcccagggctgcggggagggccaagtggcctgtctctttgaggatgtggtccccatgaactacatggtgtacttcaacttctttgcctgtgtgctggtgcccctgctgctcatgctgggtgtctatttgcggatcttcctggcggcgcgacgacagctgaagcagatggagagccagcctctgccgggggagcgggcacggtccacactgcagaaggaggtccatgctgccaagtcactggccatcattgtggggctctttgccctctgctggctgcccctacacatcatcaactgcttcactttcttctgccccgactgcagccacgcccctctctggctcatgtacctggccatcgtcctctcccacaccaattcggttgtgaatcccttcatctacgcctaccgtatccgcgagttccgccagaccttccgcaagatcattcgcagccacgtcctgaggcagcaagaacctttcaaggcagctggcaccagtgcccgggtcttggcagctcatggcagtgacggagagcaggtcagcctccgtctcaacggccacccgccaggagtgtgggccaacggcagtgctccccaccctgagcggaggcccaatggctatgccctggggctggtgagtggagggagtgcccaagagtcccaggggaacacgggcctcccagacgtggagctccttagccatgagctcaagggagtgtgcccagagccccctggcctagatgaccccctggcccaggatggagcaggagtgtcctgatgattcatggagtttgccccttcctaagggaaggagatctttatctttctggttggcttgaccagtcacgttgggagaagagagagagtgccaggagaccctgagggcagccggttcctactttggactgagagaagggagccccaggctggagcagcatgaggcccagcaagaagggcttgggttctgaggaagcagatgtttcatgctgtgaggccttgcaccaggtgggggccacagcaccagcagcatctttgctgggcagggcccagccctccactgcagaagcatctggaagcaccaccttgtctccacagagcagcttgggcacagcagactggcctggccctgagactggggagtggctccaacagcctcctgccacccacacaccactctccctagactctcctagggttcaggagctgctgggcccagaggtgacatttgacttttttccaggaaaaatgtaagtgtgaggaaaccctttttattttattacctttcactctctggctgctgggtctgccgtcggtcctgctgctaacctggcaccagagcctctgcccggggagcctcaggcagtcctctcctgctgtcacagctgccatccacttctcagtcccagggccatctcttggagtgacaaagctgggatcaaggacagggagttgtaacagagcagtgccagagcatgggcccaggtcccaggggagaggttggggctggcaggccactggcatgtgctgagtagcgcagagctacccagtgagaggccttgtctaactgcctttccttctaaagggaatgtttttttctgagataaaataaaaacgagccacatcgtgttttaagcttgtccaaatga

SEQ ID NO: 373 - protein, 332 aa, Homo sapiens
MLLETQDALYVALELVIAALSVAGNVLVCAAVGTANTLQTPTNYFLVSLAAADVAVGLFAIPFAITISLGFCTDFYGCLFLACFVLVLTQSSIFSLLAVAVDRYLAICVPLRYKSLVTGTRARGVIAVLWVLAFGIGLTPFLGWNSKDSATNNCTEPWDGTTNESCCLVKCLFENVVPMSYMVYFNFFGCVLPPLLIMLVIYIKIFLVACRQLQRTELMDHSRTTLQREIHAAKSLAMIVGIFALCWLPVHAVNCVTLFQPAQGKNKPKWAMNMAILLSHANSVVNPIVYAYRNRDFRYTFHKIISRYLLCQADVKSGNGQAGVQPALGVGL

SEQ ID NO: 374 - DNA, 32767 bp, Homo sapiens
  source 1..32767: mol_type = genomic DNA
ccgggacgcccctcagtgcctgctgctgctgacatggagaagactcggatcaagagtcaggcgcaaggtggctttcaacatccaagtggagaaggtgagtagacagggaaatatagaagcctaaagcccagaagaaaaaagaccaagccccctgcctcagcctcccgagtaactgggactacagcgcccgccaccacacccggctactttttgtatttttagtagagatggggtttcacggtggtcttgatctcctgacctcgtgatccgcccgcctcagcctcccaaagtgctgggattataggcgtgagccaccacgcccggccgaggccatgggtttcaagaaagaggaagtgatgggtgacaaactgctgagcagttgagcaaggcctgaggggcggctattgggtttggcaagacgtatgttgctggtggctttacaagggggtgtcaggagtggggaccgagggcagatctcgcttgggaggagttttgctgtaaaggggaacagagaaatggggagatcatcggaaagggatgtgggattagggagggtgttttctttcctcttttttttttttctgaaagtatggaaagataacagtgcattctcttgcctgtgcggatgccagggagacggggaaggagccagattccaggcacacatggagcagggaggctgagcatggggaggctggcggctgaggcgtgtcgttgcttcctacagccggtgcagctgtacaagggcatgggactggatgtcagccagacaaggctgggggacaggtagaggaaataggctggcaaggtggaggcagttgtccaagaggggacacctgaagcagaaactctggagaacatgcagttactgagagtgacaagtctcagccttggccaggactccgtgaaggtgggtcaggtgtgttggagggaaagagcgttgtggaggaagagattgggaagcagaggcaggaggattcatggacaacattgttgaagctgccagaaatgagcataggagtgtctggcgacagaaggacagtgtgaggaggatgagaaaccttccctgagtggtcagagtggctggaggtctggaggtgactgtggcaagcagggctcgagggtgatgtagtccctaagcatgctcttggagaggctgggttgttacggaaggagaggggaggaatattctggaaaagtagggagaagagctctgtcagctgcaggtcctcagagaaggcagggtgtgggagacaaaaacagacaccccttgagagagctgcaggagaaacagcatcttcaggggagaccccgacttctagcagagtgagagagtggagggacatccgagaagaggctgaggaggatgtagaggttttatgatgacaccgtgagttgacactgagagttcccagtggcctactgacaatttgggggtcactaagaggtagacatttaggtcagtttaaagaatgtttgaaccctctggagatgacagtggtgtggaatatgaagtggaatccagactaaaacaggaaagagccaggagcactttctggagtcaggtgaatggaatgaccaggtgagcccaggagccatggggtggactccaagatgtgctgaggctacagtagaaccatcaaggaagaaactcactgaccatgcttttctcagcccagttcatgaggggctgccctggcaggagggctttcctgtggaggtggccaaggagcactgtgctctcctccctccaccaggtatcaaaagtcaacctgctgcccacccgcattcacagcagcactctgaacaatagcagaaaggtggaagcaacccaagcatccatctacagataactggataaacaaaacatgattcatttatataatgggatcttattcaactttaaaaaggaaagaaattctgacaacagtgctacaacctggatgaaccttgaggacgttatgctgagtgaagtaagccagacacagaaagacaaatcctgtgtgattgcacctacatgaggtagtagagtagtcagattcatagagacagaaagtagaatggtggttgccaggggctgggggaaggggaaaatggggagttagtgtttaatggggacagagtttaagttttgcaagatgagaaaggtgaggtgaatggaggtgatggctgcacaataatgtgaatgtacattttggttaatgccaccaaaatgtttaagaggatgttaaaaaatgtcagattggggaaactgaagctatcctattgcctcgaggccacacagttgacagacggctgcagcattggaccagaatgtgtctctgaccccacaccctgcaggggctctgcaaggcagaggaagaatcggggctgtggtgattagaaacagtgagcatcctggggcgaccctgttgagcctcttaggaagaactttttaaatttttatatattttttggagttggtttatttgaatgtgagacactacaattggtttatgtgtctcctttttttttttttttcttttttaattttgagacagggtctcactctgtcacccaggctggagtgcagtggcgtgatctcagctcactgcagcctccgcctcccaggctcaagcaatcctcctacctagtctccagaggagctgggacaacaggtgtgcaccacctcacctggctaatttttgtatttttcctagatacagggtttcgctgtattggccaagctggtcttgaactcctgagctcaagcgatctgtgtgccttggcctcacaaagttctgggattacagacgtgagccaccgtgcctggccaggaagaacgttcactgactcatttgccacattcagatcttacccagagacatttgaatttccaagggtgatgatttgcatcgggtggagcagagcaccatgggcacttagcttagcccaggctcagcaaaaagctgaaatgctcacaaacagcaggccctgggcattatggttattttcctgacctcagtctcaagtgccaaatctcaaaactatcattaaaatgtccatattttttcatttagagaaaacagtgtctgctaaaatccataatatccacctgagtgtttgttcagcacagctggcctgacagcacttgtttggaacttgacaagtaagcctaaattcactgggaaggatgaagctaagaaaatttggaataagaacgaaggcggatgcaccttgcacatatcaaaacacaccatagaggtgcagtgctggccaggcactgtggctcatgcctgtagtcccagtgttttgggaggctgagacaggaggatcgcttgagcccaggagtttgagaccagcctgggcaacacagcaaggccccatctctacaaaaaatttaaaaggagccacacagataggaaagaaaagagaaacgcagggtgtccagatgtaatgtctatgttattccacctggaaatttccccttggagcttagcgcttcaatgctggcctctaccaagagcctaaatccaaggtcaccctgaggcaactcttcatcttactccagaaggctggaaaccttcagtcctccccagcacccactcatgtgtgaagtgagatctgatatctttgaaggacatcaacattgggtagaaatagcctaagaaagacttccatgtccttttccttagcaaggatccacatgcagatctggccctgggatgggcatggtgtgggcatcaccagaggggcagcaggaatgcaaacagacctggcttaagatccagctctgctacttaaccagctatgtgtggtggctctgggaaggtcatccagtcatctgcagcctcagccacttcacctctctacacaggatcaagttacaagctatgtgacttgcttttgtatatcttctttggagaagtgtctgttcaagtcctttgcccattttaaaaattggattatttgtctttttctctttttttttgagatagggtctcactgttacccaggctggagtgcagtggcatgatctcagctcactgcaactgctgcctcccgggttcaagccattctcgtgcctcagcctcccgagtagctgggattacaggcactcgctaccatgccctactaatttttgtatttttagtagagatggggtttaaccatgttggtcaggctattctcaaactcctgacctcaggtgatccgcccgcctcagcctcccaagtgctgggattacaggtgtgaaccaccatacctggcctggacactagacttttattagatatatgatttgcaaatattttctcccattttgtgaactatctttttattctcttgatagtgccctttgatgtacaaaagtttttaacttggatgaagttcagtgtatctaattttttatctgattgcttgggtttttggtgtcatagttaagaaattgttggccgggcatggtggctcatgcctgtaatcgcagcactttgggaggccgaggtgggaggatcactaagtcaggagttcgagaccagcctggccaacatggtgaaaccccgtctctactaaaaatacaaaaattagctgggtatggtggcatatgcctatattcccagctactggggaggctgaggcaggagaatcccttgaacccgggaggcagaggttacagtgagctaagatcatgccactgcactccagcctgggcgacagagcaagactctctcaaaaaaaaaaaaaaaaaagaaagaaattgttgcccaaggtaatgaagatttacacctatgttttcttctaagatttttgtagttttagctcttacatttaggtgtttgatccattttgagttgatttttgtatatgacttgaggtagtagttcaacttaattcttttgcatgtggatacccagctgtcccaggagcatttgttaaaaaggctattctttctcccattaaattgtcatggaatccctgtcaaatatcaattgaccataaatgtaagcatttatttctggattctcagttctaattcatcaatctatatgtctgcccttatgccagcaccacattgtgttgattactatagttttgtaataagttttgaaatcaagaaacgttcatttaaaggtaaaaacctaaaaataacaaataaaaataaagggaaaaaaaggaggtgttagtccttcaattttttttttttttttttttttgagacggagtcttgcactctcacccaggctggagtgcagtggcaccatctcggctcactgcaagctctgcctcccgggttcacaccattctcctgcctcagcatcccgagtagctgggactacaagcgcccgctaccacgcccgactaattttttatatctttagtggagatggggtttcaccgtgttagctgggatggtcccaatctcctgaccttgtgatccgcccgcctcagcctcccaaagtgttgggattacaggcgtgagccactgcgcctggccttgtttttctttttcaagattgtttttgctattctgtgtcctctgcatttccatataatttttaggatcagcttgtcaatttttgcaaaattttgagagattgcattgaatatgtagatcaatttcggtagcattgccatcttaataatattgtcttccaatccatgaatatggactatggactgtctttccagttatttgggtatttttaaatttatttcaattatgttttgtagttttatttgtaaaagtcttgtgcttctttggttaaatttattcctaagaattttgtttttgatgctaatgtaaatgaagttgttttcttaattttaagattattcattgctattgagtaaagatacaattaattttatattttgtccaagatactgatcttgtattctgcaaccctgctgaagggcatttatttgttctaaaaggttttgtttttgttttgtggatctcttagggttttctatatacaagattatggcatttgcaatatacatatatgtgtgtgtatatatatatatatagagagagagttttagttctcctttctaatctggatgcctcttatttgttttttaattttttcttttggctttatttccctggctagaacccccaatacaattctgaatagaagtgagagcaaaatccttgtcttattcttgatcttagagggaatgcttgcagtcttttatcattgaatacgctatattagctttgagtttttcatagatgtcctttatcaggttgaagatatttctttccatttctattttgttgatttttttcaaatcatgaaaggatgttagattttgccaaatactttttctatgtgtattgagatgatcatgttatttttcctttattctattaataacatgtattacataattaaatcttattcattaaaccaacttagcattcctgagataaatcccacctgatcatagtatatattttatttatttttttatttttttgagatggagtctggctctgtcacccaggttgcagttcagtggcacaatctcagctcactgcagcctctgcctcctgagttcaagcaattctgcctcagcctcccaagtagctgggactacaggtgcatgccactatgcctggctaatttttgtatttttagtagagacagagtttcaccatattggccaggctggtctcaaactcctgaccttgtgatctgcccaccttggcctcccaaactgttgggattacaggcgtgagccaccgcgcccgacctctatatatcttatatcctttttgttcctctatttctccattgttgacttcttttttgttaaataggtattatctagtgtacctttttaattctcttgtcaattatttgttaaaatgtcagaatatataatgatataaaaaagctttcttcctatattgttccatttcctcctctccttttggctattaacatcatacaagtaatgtctttatacactgtgtgcccatcagcacatatttctaattattgttttatgctgtcttttgtattaattaatttatttatttatctatctattttgagacagagtctcgccctgttgcccaaagtggagtgcagtggtgcagtcttggctcactgcaacctctgcctcctgggttcaagtgattctcctgcctcagcctcctgataagctgggaccacaagcgcatgccaccatgccacctaatttttgtattttttggtagagacagagtttcactatgttggccaggctggtctcaaactcctgaccccaaacgatccgcacactctggcctcccaaagtgttgggattacatgtgtgagccaccgcgcctggcctgtatttacatttcatactctcttttatagttgtctttgtagtagctttttctggtgtactttatttcttcatgcatattgagttattgtctagtgtgctttcatttcagcctgaataaatagctttagtatttattgtagatctcttagtgaatttttgtttatctactctcttaatatctgcttcctttttgaaggacatttttactagatagagaatttttggttggcagtttttttctttcagagcttttactatgtcatagtagatggctcttatggtctccatgacttctgattagaagtcagatgttaatcttattgagggttccttgtacataataagtcacctttctcctgatgccctgaagattctctttgactttagcttttgacaatttgactgcagtgtgtctaggtgtagatatctttgattttattccacttagagttcactgagtttcttcgatgtacatgcttatttttttcatcaaatttgggaagtttttgaccattatgtttaaatttttctgtttctctctcactctctttctagtactctgattttgcgtatattggtacacttaatgatatctccaaggtctctgaaactgttgatttttcttttatcttttttctttctgttcctcaaattggattatctcaattgaccagtgcattcaagttcactaatttttacttttgcaagtccaaattcgctgttgtgcccttctattaaatttttcatttgttattgtacttttttttttttttttttgagatcgagtctcgctctgtcgcccaggctggagggtggtgtcgtcattttggctcactgcaacctctacctcccaggttcaggcgatcctcccacctcagcctcctgagtagctggaattacaggagcgtgccaccatgctcagctaattgttttgttttgttttgtttttagtagagacggggtttcaacatgttggtcaggctggtctcgaactcctgaccttgagtgacctgcccttcttgccccttggcttaccaaagtgatgggattacaggcatgagccaccacacctggcctgttattgtacttttcaactccagaatatctatttgattcttcatcatttccatctctttttttgagattctctatttggtgagacatctttctttcaattgtttagacagattcctgtttatttatttatttatttttatttttattttttttgatggagtctttctcttgtcacccaggctggagtgcagtggtgcaatcttgtctcactgcaacctctgcctcctgggttcaggcacttctcatgcctcagcctcccaagtagctgggattataggcctgagccaccaccctcagctaattttgtatttttttagtaaagacaggatttcaccatgttggttaggctggtctcaaactcctgacctcaggtgatccacccacctcagcctcccagagtgctgggattacaggcatgagccactgcacctggccccttttaattttttgaacatgtttaaaatagctgatttaaaatctttgtctaggcctcaggcgcagtggctcatgcctgtaatttcagcactttgggcaccggaggcagaaggatcgcttgcagccaagagtttgagaccaggccggaaaacaaaatgagaccccatctctacaaaaaaattaaaaaattgtccagcatggtggcacatgcctgtagttccagctactcaggaggctaagacaaaaggatcactggagcccaggagttcgagactgcagtgaatcatgattgtgccactgcactccagcctggacaacagagtgagactctatctctaaaaaaattaattaaataaaaataaataaaacatacatacataaaatctttgcctagtaaacctaacatcctgactttcttaggagcagtttctgttgtttcttttttctcctgtatgtgggccatattttccttcttatatgcatgtcttataatattttgttgaaagcacaacatttaaaataatacaatgtggcaactctgaaaattggatcctgccaccccagggtttgtggttgatactgtttgttgctgttgttgctgttcatttgtttagtgaatttcctggacaaattctgtgatgtctgtattttttgtcacatgcagcagctaaagtctctggctagttagcttagtggtcagctgataattggatagcaatttccttaaatgccttgaatctatagtctcccagcctttgcaaaaggacttagtgtgtgtgttggggtacactttcaccattgacaactctactttagcctttatttcctgcttatgcacagccccaaagtcagccaaaggtgacagattatggcattttcatgtctttcctgggcctatgcacatgcacaaggccttacatattcccaggaataagagcttttcttttttccttttcttttctttttttttttaatggagtttcgctcttgttacccaggctggagtgcaatggcgccatcttggctcactgcaacctctacctcccaggttcaagcgattattctgcctcagcctcccaagtagttgggactacaggcgtgtgccaccacacctggctaatttttgtatttttagtagagacagggtttcaccatgttggtcaggctggtctcgaactcctgatctcaggtgatccactcacctcgggctcccaaattgctgggattacaggcgtgagcgaccatgcctggcctgaataagagcttttcaaagcctcctatggacatgtcattttttagtttttctttttaattttttaccagcttcttgttagtcctgcctggtattgacatttcaggcaactgcggtttaaacttttccctcatccacccctaagcacacacacttttccacgcctccatttcctcaagacagttttatcatgctggttgtagtggatcatatctgtagtcccagaattttgggaggccaaggtgagtggatcacatgagccctggagttctgcctggcaacagagggagactttgtcaaaagagagagaaaaaaaagaaggaaggaaggaaggaagttagaaaggaaggaaggaaaggaaaggaaggaaggaaggaaaagagatttatcaaattttttcattaaatcaatattcagtgttctttttgtttgtttttgtttttgtttttgagatggagtcccactctgtcgcctgggctggagtgcagtggtgcaatctcggctcactgcaacctctgcctctcgagttcaagtgattctgctgcctcagcctcctgagtagctgggactacaggcgcccgccaccacgcccggctaatgttttgtatgtgtagtagagacgaggtttcatcatgttagccaggatggtctctatctcctgacttcaggatccacccaccttggcctcccaaagtgctgggattacaggcatgagccaccatacctggctcatattcagtgtttatatcagagtttcccagtaggagcaatattggcgttttggtgggacagttcttcattgtaaaggatatttagcatctctggtctctgtccactaattgccagtaatggttatataacagtgggaaccaaaaacatgcctacatatttctaaacatgctcttgagcttagcaggcagtatcacttggttaacaatctgcttcacagtatttcgactgtataattaggtttacactgaaacatatgtactgttattgcattttctgtcttcaactttcttttttttgtatagttactaattacctcccttatttgtttagtttcttagtaacgatcactatttgctaagatctccgaatgtatatcaaatatctctccataacatcaaacatagcaagtaattgcttctttctactcttactttatttatattatttatttttttgaggcagagtctctcaccgttgcccaggccggagtgcagcggtgggatcttggttcactgcaacctccagctcccgagttcaagcgatcctcctgcctcagcctcctgagtagctgggattacaggtgcccgccaccacgcccagctatttttttgtatttttagtagagacagggtttcactctgacaggccaggctggtcttgaactcctgaccttgtgatcctccctcctctgcctcccaaagtactgggatcacaggcatgagccacagcgcccggctgcttctttctactccttcttggaaacagtcctcctggagccttctgtcttttcacacaactctgaactgattaaccaggactgctgcacagcagacattctggggcttctcttcaccaccatcctggtaattggactcaaaaaatgtgaattggaaaatccaagttgtctccactgcctgtttgactgggggaggctgaagaagttcaggataatgcagagcataaagaagttacatggccaggtgtgctggctcacgcctgtaatcccagcactttgggaggctgaggcgggcagatcatgaggtcaggagattgagaccatcctggctaacacatgaaaccctgtctctactaaaaatacaaaaaaaaattagccgggtgtggtggcgggtgcctgtagtcccagctacttgggaggctgaggcaggagaatggcatgaacccaggaggcggagcttgcgtgagccaagatcacaccactgcactccagcctgggtaacagagcgagactctgtctcaaaaaaaaaaaaaaaaaaaaaaagaagttacattttctctgaatgtctgagggcagagtgaatgtatgtgtaacattacttcatacatatatggaatgaatactctttaatgtgcttctatatttatcatataatttggtccttattttaactttctcatttcagatttgaggaaattgaagtgcactgcctggcacccactttacttctgaaacaatacatgtggtaacagtattaagtgctcactattttgcaaacattgttcaagaaccctaggaaagacagtacagaataaatagaaagcaaagtctttttgtccaagaacttaaagcccgtcagtgttgggaacatgcgatttgtgtgtgcaatggtgcaggagtctggtcgtgtccatctctggggtgcagagctgcctctgaagacttggcaagacctacccaacagtcgttcactgagcagagactgaggagcctcctgggattgggctcatcctcaggaaaagcggagccagtcccaagcttgaaccagtgacaagtccttggatgtcggagagaagtagaacgttgaggtacagtaagaaacccttgttgacttccagaagtgcttgagggattttgtggggagctgaggcctggagagagtcagctgttctgaaatgtaggctgtgactcctgatgtgtgccatctttatgtacaagccagtgaggcctagagctctcaggttagacttaaaatttccctctgacactcacacagacactgaggggcaatgtgcactgtactcttttcctctttattttatagagccccaagtttattcggagggtaacatatttgggaaaggtatgccccttcctcttccccatggaataaaccatatttggtcaaagccaggcatgatcattccatttccctgtgctcatggttggtgtagggtagcaagtgatccacgacttcacctcatgataaacggtagggaggctagccctcttctgcattgaatgaggttgcatgagcaagcaatgcttgcagctgtggcagcctttttgtaaccatgtggcaacaagcctaagaggaaagctactgaagatggcagagcagaaagagagaacctgggcctgtcatgatatttctgggaccatctgtatgtcacctggattctgctctggcagttgaggcaggatgagaggggtgagagatgagacgatgtgtactagcagtctggaagaggtccacggagggtcagtttgttcaggaagcatacccttccactttcaccagtgaaagtcccacttgagtttctagggctctagtcctaacctaaccagatgctttcatcactgcagttgttttccaggagtcaggatctagaggtagtcagatggcagatggctcctcctgcccctttttagcctgaccctgtgaagtagatattgttatcccatcttatacataagaaataggggcttagaaagattaattgacttgtccaacatcaacagcagagctgggaatcaaacctggagtctctgttgctaagacctgggctctgctccctgcacaccaattgctttcaagactaaaccagctgggtgtagtggctcacacttgtaatcccggcactttgggaggctgagatgggaggatcgcttgagcccaggggttcaagaccagcctgggcaacatagtgggacactgtctctacaaaaacattacaaattaaccaggcatggtggtgtgcacctgtagtcctagccacttgggaggctggggtgggaggatcacctgagcccaggaggttgaggctgcagtaagctatgatcccaccatggtgctacagcttcagtgacagagtgagactcttgtttcaaaaaaaaaaaaaaaaaagactaaatgccatgactctcttcggattccacccttcctcctcgtgtttcctgaataataacctgttaataataattattataatatttaataataataattggcacccccatggacccagtgagtccagctcaaatcctagcgtggatcaggggttgaaggagtcaggaaaatgtatgattcatttcacaaagactttgtgaagaggggcgggttgttgtgtgagtcagagggtaccaggtggggctggggtggggagaggacggagaagggaaagctttgctggtgagggacaccggggacctgaaactcagtggactgcaacacagacgggaacagggcacagccctgtgctggagacttcctacttgggtgctatcgtttggaaatctgtcctcccaaatctcatgctgaaatgtaatccccagtgttggaggtggggcctagtggaagcagtggagcagtttctgatgaatggtttagtgccatcctttttagtgctgtcctcatgatagtgagtgagttctcactagatccggttgttaaaaaaggtgtggcacctccccccacctcttgctcctgctttccccatgtgacatgcctgctcccacttcaccctctgccactagtaaagctccctgaggccccttggaagccaagcagatgctggcactatggtttacaggctgcagaactgtgagccaaataaacctcttttctttgtaaattacccagtctcagatatttccctatagcaatgtaagaatggcctaatacattgggtgattcagggaaggtttcctgatggaggttgggctctgaaaaggggaaatggtgattctgggcacaggaaatgctagagcagagcccaggcccagcagctgcagggcgtgcaggaaccactcatagcaaccagccagacaccgttcgcctcctctccctctgcaaaatctccactcactcctttggatattgctctgaccatccccgccccgtcctgtgacctctgcggactggcatcccagcaggatggcccagctctccagcctggcagccagagccttctccactaggcctttttctcttcactctcctgggcatggcacccctgggcaaactcctaactaccacctctgcctggtatagctggaaccaccccactgtgaagcctccctcactctgtaaaagccagtaccccaggaagcctcctctaaccctttgccctctgccactccaaggaagtgctattggaggagctgcctgatctctctggccttctgtgtggcagcagaagtttgtgtcaactgctgtgggaacgtgattggtggagcaggtgattccagaactcacgtgaccaggacacggaatgtgtgggcttgccaatattttgatatataaatcaactgttttcattatggaagtaacaaaacctcaagggaaatagaaaaaaaaattccctgtaatcatcccacccagctaggaggtctactgtgtgtgtttttgacattttgctgtcctcgttggtgcaagggcagatgtgactgtttatgcctgtggagggcagaggggtttttcttcttcttgtctttttttagagacagggtctccctcttttgcccagcctggatggaatgcagtggcatgatcccagctcactgcagcctcgaacccctggcctcaaaggatcctcctgcctcagcctcccaagtagctgggactacaggcacctgccaccgtgcctggctgatttattttttatttgtttgtttagagatggggtctccctacattggccaggctggtcttgaactcctggcctcaaatgttcctcctgtcttggcctcccaaagttttgggattataggcgtgagccatgttgtcgtcattacagctacattgagatataatttatgtgccacacaatgcatgcctttcaagtgtacagttcagtggcattgaggtatatccacagaaccgtacaaccatcaccacattgagaaaatttttatcaccctaaaaaatcctttacaaaatcctttaccctttagcagtcaccccatgttttgatttttgctttacatgattttacaagcatctttgacacaggacgcgctgtacgtcctgttgctggaaaatctccttacccatcctctttggtgactgtcagcaaaggctttcgggtggtgaaatagcgtggccaggagtgctctagaacaatggtgttggtgagggctgcagaagctgaggacccacaggcagagagggagggatggtagaagcaggtggtgaggagggactcggggcaggactttgggggtaaaaggaagcaagtctctggaagcagaaccagcagcactgctgatcattgggacgtggagaaaggcgaaggctcagggtgtcagcaaacttcctagggtgggtgagggttgccaggtcaataacgaacagggtcccaggaaaaggcggcagcacaggtttggggagaattagagatgagcttggttttggtcttgttggatttgggggcaccagtctctctcctggcgagagtcggcagtggggtgttaggatctggccctcaggaggctgttagggctgaagcaagagatttgggagttaagggtgtgagggccacgtgggaggcctcgggagcctgtgccgatccagggtgagtgtgaaggaaagaaaaaagagggcccggggaacactggtattttcgggcggtggacgaggatgggacggccacgagcttgtcttaaggtagaaggcagagcggggccgtaggggcagtggcgcgggcgagggtggagaacagcgctgagcctcgctgggaggcggccggagggggctgcagcccccgagggctccttgcagtccggccccgcagcctggagacagctccggtggtgctgcgctgcccgagactgctgcacgagcggggactgcggcctcggctccctgcctgcccggcagccccccatccagtcggcctgcccggggtgcgcagggttagcctggagtgagctcgccccgcccggggttgcgcggccctggggggtcctctcgcggcggctcctgggacctgctggcgccccgggcagagcccggccccatcccaggagtcgcccggactggaaggcagtgcgagcactgggacacagcctccgagctcgagcgtgacgggaagttggggcaatttgttagttatccgccgccaccaagacgcggcacggcgcctggaccggaggggccccgcgcgggcgcgaactttgggctcgggcgagtgggtggtgctccgcccagcccgagacgggcgggcgcgcgggccaatgggtgccgcctcttggccgcggggggccccgacccgtgggtcccggccaccagcgccccagccccgaggctcagaagcggcaggcggaggcgcggtccgggcgctatggccatgcccggcgggtctcacgcggctgcccctcgcccggcgcgccttcggtagggggcgcccggggcccagctggcccggccatgctgctggagacacaggacgcgctgtacgtggcgctggagctggtcatcgccgcgctttcggtggcgggcaacgtgctggtgtgcgccgcggtgggcacggcgaacactctgcagacgcccaccaactacttcctggtgtccctggctgcggccgacgtggccgtggggctcttcgccatcccctttgccatcaccatcagcctgggcttctgcactgacttctacggctgcctcttcctcgcctgcttcgtgctggtgctcacgcagagctccatcttcagccttctggccgtggcagtcgacagatacctggccatctgtgtcccgctcaggtgaggcgctcggcgtcgcccgaactcggggccccgtcggagctccgaaatgggtcgtcttctccaggccggggttcctccctcgggggccccagacgggccaggctgggggcgcgcggggcgcttggagggctggttcccagcctggccaccccgcaacgctagaccagtgcgcccgggcacccaagacatcccagatgcgcgtcgctctaaggagatctgcgtagggacagctctagggggtccggggagtgcggtccccggcgcccggggaggcgccgtggaaaccccggggaaagcgtcacccccggggaaagcgtcacccccgtgggcgggtggagcccggggcgcgggagttttggtgatcacatctccactcctgccacgaaggccgttcctaacactcgcccgcagcggcggtgcagcggcagtcccgtgagtgctgcggctcccggaggcccgggaggttcccactaagggcaaggcaactttggacgctgggcattcgcaccgtcagaatggacacgcatgagccagcttcagaacgtgtctgctgcggagaggcggcccggcccatcccaggggaaggtgtccgttaactttggggaacgctacggactcagattatatacttttaaaaggagttacaatgcttcctcgtgtctggcaaacggccttacagcctcactgcccttgtgtaactatttatctcctgctgccctgttgggagcgggctgagaagtgcagaaaatggtggcgaacttacttgtccactctttctcccacactgagaaaatctaggattcaggggatggagtcagccagcgaccagagtggattcccagttggagctgatgacttcaacattgagagtttgttgaaagtatttattctctgtctttggtgcctgggccactttggcatttctgaggagagcttgagatctctttaaatttggagctgagacagggaaactaaatcacagagtaggaaggaagggaaggaattcatttattgggtgccaactctgtgcagacagtttataataaacgtgtccccagcagtccttgcagtagtaccagaggacgggtgctgtaaccttcatctcgtagaggaggggtgatggcccagggaggttggagtcttgcccaggatggtgtatcagggatgggtgtcagagccggggcttgaactcacagctggcaccgtgtccccacccatgccatcaggccactctgcaaggccatgtgtggcaccgtgtttaggagtcagggagaaaagtgctctgctgttttgggaggaggagcctgcctgcagtaaactggtggttgtaggggaatgtgtttgtgggaatggagccggagaatgctcccagaggccatttgagtaggcagatgtgttgggcctggtccttgcaggttgtttcgtgggtcccagcaggaacaggagcctcctgcttgggagggctgtgagccttatgtgggtgtctggccactccatgtgctgctgcccgtgctgttggaccaggaggccttatgtctcccatcaggtgtgacagcccagggatttccaaggcttagggaggacagcagtttcttctctctcttctggatcccttccctgccttttggtgtcatcgttgttacttgatggcattttggatgttttgcatccagcagagcagtcacaagccccagcctgagttgtccatctaatggaaaccccttggacttgccctggcagagaccagagacccagagaggagttagtggaacaatctcccaggccacagggagcaggaagttccatgaaagtttaaatctgttccttcttgtcctggtttgtgctgggtgaggtcttgaaaaaaatgggtgtgggtgtgttaaggggaaagtgctgtgaatcacaggccctgagcttctttgcattgccaagggcaggagggaagaacactgaggctcgccccatcctgccttcctggcccgtccagagcttggaggtctggaagaggtgcacaggcagtccccagctccctgccccagagttagtcgtctgacctggccacagcaccaccccaaccctggtgggtgggagaggtgtactagggcccccagggcttccctctcaggggctggtgcctggggcaggccttccctcagctggcctagcagttcatggccccttgggaagaggttaaaatacagattacagggcctcacctggttgtactgaatcagaatctctggagtgggtgtcgaggggattccagcagtgggatctttaaccagggacatttgggtccagcgatctaagaatcctcctagattcagggcctgaagctttcctcacttgactgacacaggctgggtgcatggcgccccaagcactgacttggccctgaggccttcctggggttgtggaactccaggtgagagtaaagttggaagtgccctgtttgggaggaggtgtgtcccctttgaagccaagcaataaggagggtgaggtgcagggagtgagggctaaaggcttaggctaggacagtcctgggacctacccccagttcctcccggttcgagggctccaagtgtgaggcctgtggccgcagagaccacagcccccacctgccaccgcattgccaaggtgtttactgatgtgacagatgacagtgtagaagggaggggagccggagggaatgccagggacaaatatgacgcccttggcctggccctttgccttcaggacagggctggccacaaacagaagtccattgcctctggttcaagtccatagacaattcctgatgttgggccctggcggcggggggctccagtccccagtggtgccgacgggagtgggcgtgtagctcctgggctgggggaggtggacgtgtacaggcaggagggtgtgggccatgcccaaagctgctcccagctctcacttcaccctcaggcaggagcacttcctcctccctgcttgaatcctgttcctttcatgccacacccactgtgggggtcttcgctgcttgtagacccagtttccctggccctgtggcattgagtctctggcagggctgaggccagctgttttcctagtggagctgaaagagggtggatccgggagggtttagttggccgaatgggtccagtgccgtgtatctgacctgtccctggaccctgcccagtcaccctctctgctcttgccacattgaggcttttctctgtgcctcacgtatctggtctttgaggtagggattaaagacctcttagcaagactttgtgcttagggtaggagttggcggggggttctgaatgtttttcaaaacttaaaaaaattgagctatagggccgggcacggtggctcacgcctgtaatcccagcactttgggaggctgaagagggtggatcacctgaggtcaggagctcgagaccagcttggccaacatggtgaaaccctgtctctactgaaaatataaaaattagctgggtgtggtggtgggtgcctgtaatcccagctacttgagaggctgaggcaggagaatcgcttgaacccgggaggcagaggttgcagtgagccaagatcacgccattgcactccaccttgggcaacaagagcaaaactctgcctcaaaaaaaaaaaattgagctatagtccaggcacagtggctcacgcctgtaatcccagtgctttgggaggccaaggcgaatagatcagttgaggctaggagtttgagaccagcctggccaacatggcgaaatcccgtctctactaaaaatacaaaaattggctgggtgtggtggtacacgcttgtaatcccagctactcgggaggctgaggcaggagaattgcttgaacccaagagacagaggttgccgtgagccaggatcacaccgctgcactccagcctgggcaacagagtgagactgtgtctcacacatacacaaaaaattaagctataattcccgtcccataaaattcactggtaatgttcgaaataaagcttggcaggggctggatacggtggctcacacccgtaatcacagcattttgggaggccgaggcaggtggatcacctgaggtcagagttcgagaccagcctggccaacatgatgaaaccccgtctctactaaaaatacaaaaattagccgggcgtggtggcacgcgcctgtaatcccagttactagggaggctgagacaggagaattgcttgaacccaggaggtggaggttgcagtgagccccagcctgggtgacaatagcgaaactctgtctcaaaaaaaataaaaaataaaaaagcttggcaggaagatttctggctctgggttgtatcctccagctttcccaagagctccctccttgggttcacccttctgcatcagtgttacctttctcttccagatcattcccatggtaatgggttggatgatggccccctgcaaaacgtatgtccatattttaattcccagaacctctgactattcccttatatggccaaaacaaaaaacaaccaaccaaaaccccacaaatactgctttctgtggatcttgagagaaggagcttatttggattatctgggcggcctcttaatgcatttgcactcttagaagataaatctgcagagaaggccgtttgaaggtggaggccacagccaaggaatgaaggatggccaccagaagctggaagaggcaacagatcctcctttggaacctctggcaggagcgtggcccacacctggaagtcagccttctcgccctgcttgttttaagccactaggtttgtggggctttgtcagagcagcaccaggaagccacccatcagtacacgaatatacccctagatcaacgccccttcacttcctcatccactcctttgcctcccccctggcaaactctgccacttgttaccaggatgccactgaattctcctgtcaggtcacccatgcgccatccctcttttggcagaatcgagcagtcacttcccggacctcgttgaacatgttctctcagcagctcctggtgggcactgtgggcccccagctggactcctgctcccctgtaaccactccacacagcagccagacgggatgacttaaaacctaagccacatcataccgttcccctgcttaccacgctgcagagacacagagagtgaaatccctatgccctaccctagcctgaggctgtgcatggtcggccttcaccccccaattctcactcaccacggccaagttatattcccacccatggtctttgcacccccgttcctcacttcacccacctggagaggcttctcagccactgcattggtttaccgccatctctagttatcccattaaaccatgtccttactcagagtctctctgcgcccagtgtgctagccttgtgggcaggggccttacaccccaggatgcagcgcgatgccggcacaggctaggaaagcacattgtggatgaatgcatgagtgactgggtgaaaagggcacatgtcaggctacgtcatgcccggggaacagctggacaggtgggaagggagggtccgagacagcaggtgtacagtgagggcccaagggctctgtgaaacgccagaagaggagctgcccccacaagttctaatgatcggaagacaggaaaaccgtcttctgaaaacatctctcatgggcctaagggacaaaagggtggagaggagtgcagaggtgtccggggactgccaggcagccagcaggggctgtgggccagaggcccaggctgaggccaggggctgcagacacgcgggacgtggcccatgggccctggctcctggtcccatgcacaggccaggagccaccctgttacctgcatcagggcatcacccaagcctgagtgttactttgctgtcatttgtcctccattgttagcacacagtcctcccaactccacttcccaggccatgtagcaaccttaaaaccagcaggtgctgtttataatcctgctggggcctccagctgacataaggggctggttcctggcatgttgattccagaggacacacacatggctaggcaggggccaaggtctgatttggtcagtgaggtcctcaaatgtgtcttggaaccaggtcagaactggggtaattcaatccagaggatacctgaaggccctctcccttcggggagggtagagtcagcctgacctggctggtcatcaggagcacatgggaactggagggcaggggagatggaggtggacttggtgtgcgtgggggtgctgtggacaggttccctctgaaggaggccgggaaggagggcccgctcaagccaccctgggccctgccctgagaccggagcctggagctgctcccagagggcagaggcctcctctgcagaccaggcacagtctgcagcagctctgcatgcctggaggtggcctggtgccctggagcagcacagccagggaaacaccgcctggcctcatgctgtggacattcccactgaattctgaaaaggacagtggctgcctttggttgtctggagaagagggtaaatgaaaaaaaagtcaacattttcccactacagatcacctggctcctttctcggtgaccacgtgcagggcaggacccaatccctgtatctcactcttctcatttgtcagtttattatcacagcatgggtgtacactgcagggacagatatggggaagtgtcctcagctattctggacatagagattttcagtcttgtgaatggcagccattgttcccaagccgtttctgggtgccaggcaccttacatccctaatctcctttgatctttgcgaccgccctatgggagcagatggagttatcttcaccacctcacagataagaagatggaggtgcagaaaattatgtttagcccagggtcacacggaagccgggactgaggcagcctatcttcccaggagcccttaaccatcatgtgagcagctggagggaaggactgcacaccccgaggtcacccccaaacacccccttgatgaggggtcccttctagtggtggatgaataaggacactggcaaattgtgattagattcctttaattattacctggacaaagaagactccagctaacctgtcaaatggacgagtgaggaaagaagctaagccctggccaatgtgaatggaatctcacagcatttgcctgacagctgtgaggctttgtggatctcctcccacctgcaccttcctcggattggggaactgaggcccaacctttccttttgcctcagatttattagtgactccagaattaggctttagccatggttattctctcctaaattattaactcgataggctcttggactccgaggctaaccagctggagacagcgccacgggcagcgggaactcaatggcaaatagcaaatgtatcttcttggacagaattaaagtggagaacagcctgtcccaggcacgggcgggcaggcttccactcagtctaggctgaggggcagggctttttctggagggtggagggttgagtggtgtggtaggtgggaggaaagtgcctgcagagctgggagtgcagggtgcgcaggagcagggggactcctgagctggcctggcaccttgggtgcttcgcacccgtgagtgggcatgggatttgggctgtggtgggggacgggccagggagcaggcagctcgaggagggccttgagcttgctgagggttttggattttgtcctgaaggtgctggtgagtccatgaatgagtcgcatttattatcttctatttttttgagttagaaatcaaccagtgggcatagaagtaaacagtcaaaagtacaaaaaggcccaaaagggaaagcaagagacccccaccagtccctctgccgggggcagcccccagcctgtttctcttggcatttgccccgaggggcgctctgggctgagccctggttttgtgctgccatcttgaagcagaatctgttgactccccactgtgaaccgccaggcccgtggctcatgccagccttctcccctatgccccacttgaatttctgttatgttttgatttttttcctgtggacatttcggcctgtgtttctgtcaagtggtgattatatttgctgactgtcaagaaaaacaaggaagaacgtgtcccccattcctttcccaggtctgctcctggtttctgtgagccgcgctgttactgtgagcgcgctgcctctcaggaagtcttccttgtgaaaggtaactcgtgctgctggaaagaagctgacactgcacagggggaagctgtagagttgtcccctgtcttggatctctgctttcctactttgcctgtcagaggcagccactatttctcatggcttcctctgcacagatggtgtattgaacacatttgcattataccatgacttttatgctgttaaggtttataccatttacatttttttttttttgagacagagtctcgctctgtcgcccaagctggagtgcagtggtgcaatctcacctcactgcaacctccgattcccagattcaagcaattctcctgcctcagcctcccgagtagctgggattacaggcacgtgccaccacgcctggctaacttttgtatttttagtagagacggggtttcaccatattggccaggctggtctcgaactcctgacctcaggtgatccacctgcctcggtctcccaaagtgttgggattacaggtgtgacccactgcgcctggccaggatcctatttttagatgccatccattactcagacattactcaaaattatgtcacattttagcctgcttcaggtttaccatctggaaattagaaagttaaagtaggaagcatgccttcccacatcctcgtgatcacccagcttcttaatcaccctcatgctgagcctcctcacccctttgctatgtgtgccacacagccgctagggcttcctttactgtgcccttggagtggttccagcatttcctgcattccatgttctctttcctctttctaggatttcatatttgttagacacgaggataaactttctgggttcttatatgtcaaaaatgtttttttggcctggtgcaatggctcgcacctgtaatcccagccctttgggaggctgaggcaggaggatcgcttgagcccaggaggttgaggctgcagtgagctgcattcacaccactgcactccatcctgggcaacagagtgagaccctgtctcaaaaaaaattttttatttctcacatatgattggttggttgatagattgtggttcggaagtgttttccctcagatgtctgaaggggttgctgtaacacccagtgttgctcacaaagtctggtgtgtaatgattcttacttgtaacttgtatctctcctctgggaacctttgggatcatttgtttttccttggtgttctgaaattttgtgagactgggtctaaatggtaactcttacttttttttttcattgaggatggcactagtaggtaggtgaaccttgccaatttgaagacttaggtctgtcttcagctctgaaattttcaaagaatacagttgacccttgaacaacttgggtttgaactgtgtgggttcacttaaaatggattttttttcaaccaaacacagattgaaaatacagtatttgcgggttgtgaacccgagtacacagagggccaacttttcctgtagtggggctcttggggccaacttcaggatttgattacatacggattttggagtacttgggtgccctgggacaaatcccctgtgtataccaagtgaaaactgtattttcttaattaattccttatctccatttcctctgttcttttctctgggattctttttttgttttttttgtttttttttttcgagacagagtctcgcttgttggccaggctgcagtgcagtggcacgatctgggctcactggctcactgcaacctccatctcccgggctcaggcaattctcctgcctcaccctcccgagtagctgggactacaggcatgtaccaccaagtccggctgtattttgtattttttagtagagacggggtttcaccatgttggccaggctggtcttgaactcctgacctcaagtgatccactcaccttggcctcccaaagttgtgggaccacaggcgtgagccaccacacctggccgcctctgggattcttttttttttttttttgagatggaatcttgttctgtcacccaggctggagtgcagtggcacaatcttggctcactgcaactttcacctcccgggttcaagtgattctcctgcctcagcctctcgagtagctaggattacaggcgtgcaccaccacacgtggctaattttttgtatttttggtagagatggggtttcaccatattggccaggctggtgtcgaactcctgacctcaagcgatctgcctgcctcggcctccataaatgctgggattacaggcgtgagccacgcctctgggattcttaataggcagatggggacgtcccctcctttcctgatcactgttctctgacagttcccagtgctttctcattctttgtaagagtttcttcgctttttttcctttgttcttctatttttcaatacaattttagcattcatatgtttacttttgatgaagactaagggattttaaattgactttgaaaaacattttttagattcacatggttgagattcctcgtgtggcagagtgtacataacctaaactcttcccctcccccacccgttatcactaggtctctagccacagcttggggagagtgtgggagggggaggggatcaatgccacagctcccaaagcttgcccacaggctgtcttcctcttgacatctgttcttttcttaatcccattctgatccctgctgtttgctagactggagcctctcatcctggccatccatgtttccaatttagggttccatggttcatgctgatgatcctgtccaccttctgtttttagaaactcataaaaatctccggtttgctgatatcatcctctacttctttttttaggatgattatgtgtgtcttttttttttttttttttttttttgagacagttttgctcttactgcccaggctggagtgcaatggtgcagtcttggctcactgcaacctctgcctcctgggttcaagcgattctcttgcctcagcctcccaagtagctgagattacgggcacatgccaccaacgatgcccagctgatttttgtgtttttagtagagacggggtttcaccatgctggtcaggctggtctcaaactcctgacctcaggtgttctactcgcctcggcctcccaaagtactgggattacaggcatgagccaccgcacccggcctgtgtgtctttactgtcattaaaatgtgattttgtgaggagtgataattaggtggaacttggaatgccaaggtacaattttaatctggagtttgatatggtcaggtttgcattgtaaaagtcactggtggacagctgaaggaaggaatggacgggacaagatgatatagggtagccacttggcatccagatgagaaggaaaaaagcatgaccagggcagaggccatggagatggcagcagactctacagatattggagactcgtagaaccacaatttctgcaccagagaaggctgatgtttgatgccagccatggagttcagcagtctggagcagaggagccacaggtaaaatcatataggaaagagtcctgagaaccacagatgggccctggagccacaatcagtgagtgacacctagaaatgtgggtagttagggccaggctgagtggaattgatgtgcgtgagatctgccattgtggagcagtaatgagtcagcatgagtgactggcaagcagatctgatcgatagcacatagtcgtgtgcttctggctggaagacagggcacacgggacaggttcaagaggacttggtgactcagttggatgtggacatgaaggagaagaagactccaggatgactcccagatttccggtcgcctgggtgatgccatcctgaagatgggggctttgggaaggtgttgcctaggttgtgtttaaggtgcctgcaggttgagagacgcagtagtggtcgagtcttggggagtctggggctgctagttcttccacctggctctggacccaactcctgctttatgggagccctggaccgttcattattcctgcacagcagcctcttcccttccccatttaaatgtgttcaaactcctcccacccgtctccgcccaaccttctttggtgtgccacctgttttgcgccagtcccgccacctgcagacttcccaaagcagctttctgtctatgacatcctgatttccactgctgattttagcaccactgctgagtgtttttttttgtttgtttgttttgttttttaaacatagagaactacaaagctttattgaacgacattgtagaaccaggacctgtcaggtacacttcctttttttttttttttcttgagacagagtttcactcttgttgcccaggctggagtacaatggtgcgatcttggtcaccgcaacctctgtctcccaggtttaaacgattctcctgcctcagcctcgcgagtagctgggattacaggcgtgcgccactgcatccggctaattttgtattttcagtagagacagggtttctccatgttggtcaggctggtctcaaactcccaacgtcaggtgatctgcccacctcggccttccaaagtgctgggattgcaggcgtgagccaccacgcccggcccaggtacacttcttaaactctccctccattcacttctcttaggccccatctccacgtctgccccattccagggcagcattctcctatctggtctctccgcatccatccttgttcttttagcccattcttcacatagctgcaatctttctgaaatgaacccctgtgtgcacctccttcctttacccagtgctcccagtgccttaggatgtcatcccagatctctcccttgcccctactccccacctggtctggggcctaggtctgcttctggcctcatccccgtcctctctttccttcgtttctctaccctgacttctcaggacccctctcaattcctgagacttctggagctcaggcctttgcgcatgtgtttccctctgcctgcggtgaccttctctctatctctttgcctgctgattcttccccattttctctgtgcccctgaaaatgacactccctctggggggcacacagggttcttttgcagctctctgcatacttgcagctcttttcttaattatttgtaatttgtttaaggtttgccatcctttctctgttatgagcagggcacatgtctgttgctttctcattatcccctgtgtgttgtccagtcactggcttggcttgtgacatattaagagtcggcagtatacatgtgcatgcaaatgtatgaacatgtgtctctgtgtgtgtataatcgggggtgggattagctctgaaccgatgagcttgttgcctaaagataagaatcccacatcgtgtgtcctgagaggagagataggagaaactgaagaggccaaaaagctagactggcttcactaaaaccagcagggagactttgatggggaatggttagcagtgttacagagggataaaatgcctcctaaatttggcattttcagaagtcatttagcaacctagtcttttaattgcagggattttttaaaaattacaaaatgagtacagtacatatttgtatctgactcatctaacgaagtttgtggtttcagaaataatgagtcattctgaaacagtgtattgtttcacagcttttaagttgcatgactaatacagtgcattactatatacctttcacttacattcacaaattatgaatagtttgctacatttggtttgtctcacacacacatacactggcacaatgatcacattctgattttttttttttttttttttttttgagacagagtcttgctctatcacccaggctggggtgcaatggcgcgatctgagctcacggcaacctccgcctcctgggtccaagtgattctcctgcctcagcctcccgagtagttgggattataggcgcacgccaccatgcctggctaatttttgtatttttagtagagatggggttttgccatgttggccaggctggtcgtgaattcctgacctcaggtgatccactcatcttggcttcccaaagtgttgggattacaggcatgagccactgtgcctagccacatttagaaattgtaataggtgccacagtctatagtcagatgttcccagttatcccaatcatatctttatagttgttcttttttaaaaaatccaggttctattaaaaggtcatgcttgcatttaatatgttcctttaatctgaaagagttcctcagtcttttgtttgttttagtctttcaagacattaacattttcctccgggcacggtggctcacacctgtaatgggagcctgagcaggaggatcatttgaggccagaagttcaagaccagcctgggcaacacagcgaggccccatctctatgaaaattaagaaaattagtcaaatgtggtggcgcatgcctatagtcctagctattcaggaggctgaggtgggaggattgcttgagcccaggagttcaaggttacagtgagctattagattggtgcaaaagtaattgtggttttggccattaaaaaaaggcacaaattgggccgggcgcggtggctcacgcctgtaatcccagcactttgggaggccgaggcgggcggatcacgaggtcaggagatcgagaccatcctggctaacacggtgaaaccccgtctctactaaaaatacaaaaaattagccgggcgtggtagcgggcgcctgtagtcccagctactcgggaggctgaggcaggagaatggcgtgaacccgggaggcggagcttgcagtgagccgagatcgcgccactgcactccagcct

SEQ ID NO: 375 - DNA, 1522 bp, Homo sapiens
  source 1..1522: mol_type = genomic DNA
agaagcggcaggcggaggcgcggtccgggcgctatggccatgcccggcgggtctcacgcggctgcccctcgcccggcgcgccttcggtagggggcgcccggggcccagctggcccggccatgctgctggagacacaggacgcgctgtacgtggcgctggagctggtcatcgccgcgctttcggtggcgggcaacgtgctggtgtgcgccgcggtgggcacggcgaacactctgcagacgcccaccaactacttcctggtgtccctggctgcggccgacgtggccgtggggctcttcgccatcccctttgccatcaccatcagcctgggcttctgcactgacttctacggctgcctcttcctcgcctgcttcgtgctggtgctcacgcagagctccatcttcagccttctggccgtggcagtcgacagatacctggccatctgtgtcccgctcaggtataaaagtttggtcacggggacccgagcaagaggggtcattgctgtcctctgggtccttgcctttggcatcggattgactccattcctggggtggaacagtaaagacagtgccaccaacaactgcacagaaccctgggatggaaccacgaatgaaagctgctgccttgtgaagtgtctctttgagaatgtggtccccatgagctacatggtatatttcaatttctttgggtgtgttctgcccccactgcttataatgctggtgatctacattaagatcttcctggtggcctgcaggcagcttcagcgcactgagctgatggaccactcgaggaccaccctccagcgggagatccatgcagccaagtcactggccatgattgtggggatttttgccctgtgctggttacctgtgcatgctgttaactgtgtcactcttttccagccagctcagggtaaaaataagcccaagtgggcaatgaatatggccattcttctgtcacatgccaattcagttgtcaatcccattgtctatgcttaccggaaccgagacttccgctacacttttcacaaaattatctccaggtatcttctctgccaagcagatgtcaagagtgggaatggtcaggctggggtacagcctgctctcggtgtgggcctatgatctaggctctcgcctcttccaggagaagatacaaatccacaagaaacaaagaggacacggctggttttcattgtgaaagatagctacacctcacaaggaaatggactgcctctcttgagcacttccctggagctaccacgtatctagctaatatgtatgtgtcagtagtaggctccaaggattgacaaatatatttatgatctattcagctgcttttactgtgtggattatgccaacagcttgaatggattctaacagactcttttgtttttaaaagtctgccttgtttatggtggaaaattactgaaactattttactgtgaaacagtgtgaactattataatgcaaatactttttaacttagaggcaatggaaaaataaaagttgactgtactaaaaatgta

SEQ ID NO: 376 - protein, 826 aa, Homo sapiens
MEGAGGANDKKKISSERRKEKSRDAARSRRSKESEVFYELAHQLPLPHNVSSHLDKASVMRLTISYLRVRKLLDAGDLDIEDDMKAQMNCFYLKALDGFVMVLTDDGDMIYISDNVNKYMGLTQFELTGHSVFDFTHPCDHEEMREMLTHRNGLVKKGKEQNTQRSFFLRMKCTLTSRGRTMNIKSATWKVLHCTGHIHVYDTNSNQPQCGYKKPPMTCLVLICEPIPHPSNIEIPLDSKTFLSRHSLDMKFSYCDERITELMGYEPEELLGRSIYEYYHALDSDHLTKTHHDMFTKGQVTTGQYRMLAKRGGYVWVETQATVIYNTKNSQPQCIVCVNYVVSGIIQHDLIFSLQQTECVLKPVESSDMKMTQLFTKVESEDTSSLFDKLKKEPDALTLLAPAAGDTIISLDFGSNDTETDDQQLEEVPLYNDVMLPSPNEKLQNINLAMSPLPTAETPKPLRSSADPALNQEVALKLEPNPESLELSFTMPQIQDQTPSPSDGSTRQSSPEPNSPSEYCFYVDSDMVNEFKLELVEKLFAEDTEAKNPFSTQDTDLDLEMLAPYIPMDDDFQLRSFDQLSPLESSSASPESASPQSTVTVFQQTQIQEPTANATTTTATTDELKTVTKDRMEDIKILIASPSPTHIHKETTSATSSPYRDTQSRTASPNRAGKGVIEQTEKSHPRSPNVLSVALSQRTTVPEEELNPKILALQNAQRKRKMEHDGSLFQAVGIGTLLQQPDDHAATTSLSWKRVKGCKSSEQNGMEQKTIILIPSDLACRLLGQSMDESGLPQLTSYDCEVNAPIQGSRNLLQGEELLRALDQVN

SEQ ID NO: 377 - DNA, 32767 bp, Homo sapiens
  source 1..32767: mol_type = genomic DNA
agtgcacagtgctgcctcgtctgaggggacaggaggatcaccctcttcgtcgcttcggccagtgtgtcgggctgggccctgacaagccacctgaggagaggctcggagccgggcccggaccccggcgattgccgcccgcttctctctagtctcacgaggggtttcccgcctcgcacccccacctctggacttgcctttccttctcttctccgcgtgtggagggagccagcgcttaggccggagcgagcctgggggccgcccgccgtgaagacatcgcggggaccgattcaccatggagggcgccggcggcgcgaacgacaagaaaaagtaagcccattccctcggcccgccgccttctcccccggcgaccccgcccgcctgcccgccctgggctcctgggccggcctcggcgttaatgggattggggggggcagcctttttgtttctgctgctgctcccctcccctctcttcccccaacctcgccggccgggctcccccgctgtccacgtcgccatcttgtcgtggggggtgggagacgcctcgaaagtgctttcaggggccggggtctgagccctgcttgccctccccgccggccgtgggggcctcgcgccgcccacctacccgcctcaaaaacccagcctgctctgtggccccatccggaggggactttacccagcctgaaaaccccgggaagagaaatgagctgcagctcggtagccgcggtttgcacccggagcttccgctccttcccgcccccatcctctccagttccattgaaaactcggccctggggcggaccctgcacgctggtcctggctttccagtggacttggggccttgagttcccgactgagggactcgcgtggtcggatgcgatcttgtcctgtagttgtccagccgtcgcgggtgtctttgcctttgtgcattagggatttgccgcgatggccttaagatgcgaactttttagtttgcacgtgcaggttttgtttcgttttaatcgccttgaaaaacttgcctagactgagagtcagagtaatgggaatttagggaaatggcaacattttaaagagaacttcagaattggatacttgagttcatatcacctgtcacgagaacgcagatattataaatgaatatatgcctcattcattcttcaaataatgaaaatgtaggggctggttaaatttaggcagttttaatgatactgaaaaaagtatatgatgagtgaatgaaatgcggcactaaaatgttgcaaaaattttcgaactctgtctcattttcctgaaattgaagtatattaaaggaaaaccgtcaacatatatctaaagtaagtaatcactcggttagaacttaatgcaagttttataaatcaccttgaagtttgagtctaaggggtacattagagattaagaattgtgagttggaccagtggtgttaagagcggactcccccatcccccaacacacacacaattttgcccactttggcattttaacttttaaggaaatcacttaaggaattgaagatttagagtaagagttttggttagtagactggctttgctgttaaatccttccactcttctggcagagagattaatttccctaatcagtatcagcagaagataaacttgtttatattcctgctgttttgtagatcccttctcctggtccttcttcaatagaatattaaattcttagtttgtatacagcagagaaggtcacttataaaattcaaaaagtgagcaaacaggtctagattaattccaagagttaccaggaattaattgcagtttattttgcggaggtgattacagtgcttttgatgaaatgataaagctgctatattgtaaacctaaggcagattacctctgtgtagtgccagttttctatccttattatatattgaatcatacttaatacaatgcattaaattatgtaccactttttttatatacagtatcgaactcattgttttgccattcatccgttcagaatatcagaagcagttttgaaacgaattaataaattagctactgttcatcagccccaattctaaataagctcttagattttcctcagcccatctgttactttcaaaattttctcatttgaaaacttggcaaccttggattggatggattcatatttcttagtatagaagttcttgatataactgaaaaattaagttaaacacttaataagtggtggttactcagcacttttagatgctgtttataatagatgaccttttctaactaatttacagttttttgaaagataactgagaggttgagggacggagattttcttcaagcaattttttttttcattttaaatgagctcccaatgtcggagtttggaaaacaaatttgtctttttaaaagaaggtctaggaaactcaaaacctgaagaattggaagaaatcagaatagaaaatgggtatggttatgatactgtagatttaacgcaggacatttcatgttgttcctagttataggggctgaacttatttaatagcacgtgcattttgatttttagatttttaagggaatgtcaagagagtaatgattctgtttcaggcttcaggccagactccttcagagttttccaaaacaaataattactgaatcattaaagtaaaatttctgagaatagatattccttaatttccttcattaactttggccattaaaagtcaagaagctctctcatttattagcaaacttttctccttatgattctattttgattgtccttttgtttgaggaagcagcatatggtggttaagagcataggatctagaggcagatacctctgagttaagggtcccagcccttcacttgtgagcttgagcaagttactgaatgcctctgagcctctttcctccttttgaaatgatgataagaatagcagccatctgagcagttattgtaaaggttaaatgagataatgcttgtgaagcacttagcccattgcaggagtcttgatgacactgtgtacttgaaaatagatgttacctgttaaaattcttgtttaaacttccacaactcttaaaactcttttttgctagtccttccagctgtttcctttagtttcttttctgtgtcttcatgcatcttttctatctcctgaaagtgaaaagactaacattggatccagagcttgaaaagcgtttttttcctgttacaatgggcaaaagagtacatccttgggttatattggcacctagtatcagttatttttcttgagcatctgatctgctctctactctagtggaggcctcctgcttcacaattgctcacccctgtgttttctccccaaatagaatactgagtttactctggactctagagtcaaacatacacagtattctagtcttactgttcatttaagcaagatatgtgcaagacactgcattcttagtactggcagtaagttaaaacatttttcgtcttgatgccaaagtttagacaattttataaaaattaacctttgtaaaagataatgagttgataaaatattctcagtaaagcagctacgtggtagaaaaactgtcctttgcttatgagtttctccagagttaagaccattgggttccatctgaaggcaagacttcaagcttgtcttactggtctgttttgtggctcaatttgtatgaagtctatgcactcttccacacgtgtgtatttactgaactatcgagttattttagactgagaaagtattggagttcattcctacggtccactgcagagcaccttgtgcagtttggagaatgtcaacttttctacctgttaacttccattgtctttacttttaacgccattgtctgtgactctaatggtgtcacggctcagggtttagattttgtggttacattctattcttgtatgtcaagagtggtgtatagaaagctgagggggattatttagtctcttgactgattttttttttttttctgaagaactcagtttattatgtttggtggtgaaataaaaattgatgtgcatggatgttaaagatttgggttaaattgtgtgttcatagatgccttctcttagtatataattttttaaatttagatacttaaaatactgtatccctttatctaagattaacataagtctgtttcttaaccaggataaaaaaatctaaatttaaatgtgatgttggatgagtttccaatcaagaaattgattttttaaactttgtgactagttatccagtgggtggattttacccagtgtgtgtatgtgttttctgcttaactctggaaggttagaaagagaatttgaaactaagacaagccaagcttcttgttgctcagtatttttggtaaaaatatggtcagattgtttaaattaactataggctttggaattttaaaaataattatatctcttggtctcttgacacatcaagaattaactgttttgtatatgcgttgagtattaatgttcatgttttctgcagtagaaatttataaacccttatttatttgccagacatgatccctttagagaaatctagtatctaaaacctgaatttttaaaacaaaatttaaaatttttgtttcataaaaacaaaaatgtgattacctcatggcttttttcttatagcttttgattgttttttaaaatcgtagttcaaaaacattaacctaaaatttaccatcttaaccatttctaagtactgttcagtagtgttaagtatattcacattgtgccactaacttccagaactttttcatcttgcaaagctgaaatcttacccattaaacaactcccaatttccccctctcctcagcctctggcaaccaccattttactttctgtttctgcaaatttaactactctagatgcctcatataaatagaattatagggttttaatatttttgtgatgggcttatttcactttgtgtaatgtcctcaaggttcatccatgttgtagcatgtgtcagaatttccttcctttttgagtctgagcaatattccattatatgttccatattttgtttctccattcatccagcaacggacacttgggttgcttccacatcttggttattgtgctgctctgaacatgagtctgcaaatctctctttgaagctttcactttttttggatacatatccagaagagggatgctggatcatatggtaaccctttttaattttcaaggaaccaccatattgttttctatagcagttgcaccagtttacattcccaccaacagtgcacaagggttcctatttctccacatccttctaaacacttgttttctttctttccttccttctcttctctttctttcttagccatctaatgtggcaaagtggtagccatctaatatgttgaagtgattgtttttaagggcttgtttgtggataattaaccagctgaaagctaactacagtttgccagtggaagctttaactgaaaggagagtaagtacctctaaaaggagaattcaatttttctagtgacttagatttgttatgccagtactttttcacagaaacactttttgggtaaaatagtgtacacctgttctattgttgataaagcccaatttaattaggaaatttgttctctaagatttaaaacaataattgaaataatgtatttttattaaaaactgttcccaagatgttagcttttagctgttctggtgatctcaactgttatttatgagtgtttctttattttaaaatttcaccttaaccggttacagttttaaccataaagattatttcaacatatgattttgaaaatttattatcttgtaaatgggaaaatgtagtgatggaacatagtttactgtatgtagttcttcacttgtttgaaaagtcacaatatatttaggcaaattaatttaaaagtgtctagtatttaatattgcaattttcactcattaaggacaggtcccccgtgtttcccccttttttttttccaagtagtttgggaggatttgtttttccagctgaaaaatactatggttaaaaataaggtttaaaggcgaaagttgaagtctttgagggttgggatacgtttctgttcttaagagtcttgtaaattcagatgctaagcaaatttctttaaaatgatttctaccctccccctttccattataaaactggatatgtttcagtggaccaaatcccaagtaggctgaatttgaaatttgtgggctgggcgcggtggctcatgcttgtaatcccagtactttgggatgccgaggtgggtggatcacctgaggtcaggagttcgagaccagcctggccaacatggtgaaaccccatctctactaaaaataccaaaattagccaggcgtggtggcgggtgcctgtaatcccagctacttaggaggctgaggcaggagaattgcttgaacctgggaggcggaggttgcggtgagccaagatcgccccattgcactccagcctgggtgacagagcaagactgtgtttcaaaaaaattaaaaaagaaatctgtggtgtgaatactggtacgtggtgtacacagtgagctcttaataagtatttgaattaacaaatgagacaatgattgaataattggatgaacaaagagaatgcaggtttttaaaaggtttctttagaaatattgtcggcccggcacggtggctcctgcctgtaatcccaccattttgggaggccggggcaggtgaatcacctgaggtcaggagttcaagacaagcctgaccaacttggagaaaccccgtctctactaaaaatacaaaaaaaaaaaaaaaaaaatagcaggatgtggtggcacatgcctgtaatcccagctactcggaggctgaggcaggagaatcgcttgaacctgggaagcagaggttgcagtgagccaagatcgcgccactgcactccagcctgatgacagtgtgagatgctgtctccaaaaaaaaaaaaaaaaaattaaaaagaatgttttaattctttagttccctgtctgagattcactgattggtaagaagaaagttaaagaatctcctttgactttttttgatatagatatttaaattctattactttatagtaaggttggggtttattttctttgctttataatagaagagcattgattattctctttgctttataatagaataccatttaaataggagttccctgagtgtgtttacaatcatttgatctggctaaactattttaatgttaatgaaattttaaaattttggaggaaaaaatttaaaaactacacaggtgcacaaagaaataaaaatcacctgctttttcactatgtagagaccattgtctactatttctcaattctgtgttacatctgtatgttaataactgtaggattagggactgagtactgtttttaacctgcttttaaaaaatttacatctacattttttcccatctaaatagtgaggaagagtatcagaattttgtaggcttgtggtgatggttaaattagataatattaatgttgggtacttaacataatatatggctcttaatactctccagatttcagatatagtctgttttaccattactgcctttttatcaaacctattctcaaaaaagtgagaaaagtgctgagattacaggcgtgagccaccatgcccggcctcatggttctttcttaataataaattagaagaagtagaattacagggtcaaaaagtatccattttaaagctttcaatgtaattgcctgtttatcttctagaaagtttgacctagttgtattttagagtgtcattttcttgaactttatcatcattaaagttttaaatttggaacactggcaatttgataagtatattaggattcttcttattgcaagtagcaaaatacaactcaatctagtttaagaggggaaaatgtagtcattggctaacacaatctaattttggtttaagagacaaatctagagtctcaaatgatctcagagtgtaataatccctgacttttgtcttgatattacttggcttgtatacctttgctctatttgcatgctggccttactctgccactgacaggctgtctgtatggtgtggaagaggacggctagcatccccatacctgcatccatacagtttgtaatataaaaaaaaaaaaagtaaaaaaaactccctctctcttctagtgtctatatatcagtttcctagaagaaaacgttttgccctacttggccatgtgaatggagttccctgattacatgagtcaaatatgtcttattgtagcatatttgatggtcttcttgtagaatattatcttactatacacagaactcttgaccagtaattaatgggccatgagtttttgttgcaagtcatttgaattcatattctatagttttctaccaagtgtagtcattctgcaagctgttcttgtcatgacttttgggaagttgagtatttcttctatgggttagggttttcatctcaagaaaaagatgatccttttctctactaaatatgtgttaagatcacacatttttctagatcgtttagctctactgtgtgatcttacacaaattgctttattgggatgataagaataattgccttataggattgttatgagaatgaaatgatacatcaactcatatgaaacactcagaacagctcttggcacaaagtaagggcttaattaagtagaaactatccatatattcataatattatagtattggttaagttgttttcaacattgtttagaatcgctcaagccttctttgtgataatctgacgaaggctattcaccaccagtgagtaaataatagtggcagaatagttactgatgcttttcctttacttggttttttttccataaacatctggcctttgcagactaaatactggtttatgtatagacatgttattctaaaataattttccatagtggtaatactaaaggaagaaaaatgttctcaaagctatttatttgggatgttaaaggagggggaaattaagaaagcctacatttccatgtcctttgtgtccagaatctcattaaatgtcttttaacttgttagcagaggaaagttggatattgcctgcctttgtagctaacatagttaaaatatttaaatggttatagtgtcaaaccagtagtcaaagccttcactgtgaatggatgaagggatattttcttgaataatttaagttgacttatttcagtggttcaaaaaatttcttcaacgcttaaccatgactcaggcacctaactattatactatgtcctgtaacagattgttgtgcattcatttattcaacaggtatttgtgcagctaatttattgagtacagcattgaatcgttgatggcttaggccacagttgaacattccattttttatgttcattcattcattcatagcatattccatttttaaattttcagttcattgcactttaaagtttgaggttcttgcgaagtacagacttttgggtttaagttttgttatttaatgtcaaccaccacaggcgcattggccagtctgcttttagaattttcagacatacatacacaaaacattctcacaagacaatctacttattttcttttttattcctgtgtttcttaacacaggattaatgttcagatctcttttggagcaaaataatcctctgaatttttgagatgtacccagtgacctcagtctgagtatgtatactgcattaaaaaatgtaaccttgttccttttagtggtcatttggtaacagtttgatcataaacaaatgcagcctcaaacacagaaggcttgaggcaagtatacagaactatggagagatcatttagatgatgtagaatatgccttttctttttttacaatgccaccaaaatgaaaacacggttttaaaaattctcatagagtgtaacttcaacactgctttaactctattaaacaaagcactgccatgttgtaattcctatttattactctctggagttgtataaattaccaaatccgccttttgtttgatatccttttcaaatatctgagggtagctatcatgtttcttccttctattcttaaaaaatagtcccaaatttcttgaatcttttaatttaaaaattatatattgagcatctgatttgtggaaaggcataggccatattaaaaatggggcttcatattaaaatggggaaaagggtggagattctcaggtggaatctgagatctgccacacactaatagtgttacctaaccctttttaaagacaaagaaacaggatcagaaggtcactttggaaaatttatttggtaatattggataggatggattagtatagttggaaaacagagactcttgctttaggagagctgctcctttgtcatttccagaatcttaatcatggtcaaggtttagagctaaatatttaatagaagaagtctttagggtatgctttctattgtacacccttatttcaatacatgtgttttttcctgttatgtaagtactttattattatttatgcatcttctattaaagttaagcaaataattatttcaaggacacattcttctacatacacacaaagtttagggtcactgaccttcttaggttctagtcttagatctgttaccatctaagagcatataaataagggaaacagaaagaaaaggatttacaagctgagaaggaagcaatgcagagaaagaagagtgatagagtaggtaatttggggaaagtcagtgatacacagctcttaaccatgaacagtgattcttcactcttgaatgtttgtgacattcatgaaggtattaaaagctgacttttaaaaaattgtttcagagaactggaaaaaaattcagttgccacattcttccttaggtcatctttgaactctactcatgcacttacgtgtttaaggcaaagttttactaaacgcacacttgttcttgctggcttattgacttttactgctagcttcttattcttagcaattatacctcacattacatagtattgtgaaactcactatattcagtgttttgcctgacaaacatggtatgttataggatgtgtattcagttatagctaaaaataaattattctcgtttttcaaaatttgctggcctacctgttaagcttttgctttaagacctgctaatgtttctcaaacttctgtggttaaatcacctgagtgtctagttgctctatggattcccagggacccattcgccagagattctgatttggtaattttgggatggaactcagggatctgtaaattttacaagcactcagaaatgaaacatagactttaaacagctaagagtgctcatcaggattatgttgatattattttttaaacagatgtgccaagcctttaatttgaatttccagggttgggatttggccttctatatttgggggaaaaaagttctattgatgattgtggatatataccacaggtcaaccattgaatagtctagtcagtgtagttagtgtattttataattactaagttctaagtatgtggtgtattaatgtcttaggaggtggatatatttcctgtatttgtaaagcatttgggtaggttttttaaagagaaaagtatgtaacaaactagttttgagcgttgctcttttacttctttgggcatttttgaagaacacgttaagtatcttcttagagcagaggggctcagagtggtccccagattatcatcattggtaacacctagttggtgcattactaacttgttagaaatgcacattctcaggcgccattcagacttcataaatcagaaactctggaagtaaggctcagcattctgtgttttttttttctttattatactttaagttttagggtacatgtgcacaacgtgcaggttagttacatatgtatacatgtgccatgttggtgtgctgcacccagtaactcgtcatttaacattaggtatatctcctaatgctatccctccccgctccccccaccccacaacaggccccggcgtgtgatgttccccttcctgtgtccatgtgttctcattgttcagttcctacctatgagtgagaacacgcggtgtttggttttttgtccttgcgatagtttgctgagaatgatggtttccggcttcatccatgtccctacaaaggacatgaactcatccttttttatggctgaatagtattccatggtgtatatgtgccacattttcttaatccagtctatcattattggacatttgggttggttccaagtctttgctattgtgaatagtgccacaataaacatacgtgtgcatgtgtctttatagcagcatgatttataatcctttgggtatatacccagtaatgggatggctgggtcaaatggtatttctagttctagatccctgaggaatcgccacactgacttccacaatggttgaactagtttacagtcccactaacagtgtaaaagtgttcctgtttctccacatcctctccagcacctgttgtttcctgactttttaatgatcgccattctaactggtgtgagatggtatctcattgtggttttgatttgcatttctctgatggccagtgatgatgagcattttttcatgtgtcttttggcagcataaatgtcgtcttttgagaagtgtctgttcatatcgtttgcccactttttgatggggttgtttttttcttgtaaatttgtttgagttcattgtagattctggatactagccctttgtcagatgagtagattgcaaaaattttctcccattctgtaggttgcctgttcactctgatggtagtttcttttgctgtgcagaagctctttagtttaattagatcctatttgtcaattttggcttctgttgccatggcttttggtgttttaaacatgaagtccttgcccatgcctatgtcctgaatggtattgcctaggttttattctacggtttttatggttttaggtctaacatttaagtctttaatccatcttgaattaattttagcataaggtgtaaggaagggatccagtttcagctttctgcatatggctagccagttttcccagcaccatttattaaatagggaatcctttccccatttcttgtttttgtcaggtttgtcaaagatcagatggttgtagataagcggcattatttctgagggctctgttctgttccattggtctatatctctgttttggtaccagtaccatgctgttttggttactgcatccttgtagtatagtttgaagtcaggtagtgtgatgcctccagctttgttcttttggcttaggattgacttggcaagcattctgtgttttgagaattcttccaggggactgtgatgaaaactgacgtttgagaaccttcatcttagagtaaaaactttacatacacatttttgttgttttatttatctagcacaatacttcttttttttgaaatggagttttgctcttgttgcccaggctggagtgcaatggtgtaatctcagctcaccacaacctccatctcccaggttcagttgattctcctgcctcagcctcccgagtagctggggttacaggcacgtggcaacatgcctagctaattttgtatttttagtagagacggggtttctccatgttggtcaggctggtctcgaactcccgacctcaggtgatccgcccacctcagcctcccaaagtgctgggattacaggcgtgagccactgcacctggcacaataccttatatataatcagggctcaaagatttgttgagaggctcaacaccaattctggaccaggaaagattttatttatatcactagtcaggaataatctaaaaacaaaaagcacattcttcttacaagtaatatttcaatacacattaatgtaaacacatggaaaagtattagctacttaataaattaacatgtaaatgaaaaatttacacattatggctatttcagatgtgatatagatttcattttcagaaggaaccctccaatgtaaaacagtgattcttttccccgtttattttactgcattagaaaatcacatttaaagtaagcattttggtgaggtttggaaggtgaataaatccatcttttctttaattatggatatttaagagagatgttgttgtgccgtttagataataatgatctaaaccaagaaatttagttgctttcaaaaataaaataagtgtatgcattctgaacatttttctttagaaacaaaccatttcatctgtttttttgaatttcaaattaattatacagaattttcaaaatttgaaaattaggttagcatgagaaactgaagatactgaattatattgcctgttcagtctatacttttctttaggatatacagtaggaaagaaatatgatagttcaagttagattactacttctttcagagttttttgacaaatgcaggtacagtgatagtgtcagttcatggtgaatttttgttaaaataaattacaaaaaatttgtgatcctggtatcttgaaactagttaatatttgtaaactttgctaacactgtatatcactgtattctggttttatctgtgcatctatgagttatatgtgtgtatagctacatatgtttatatttatacacatacattacacacaggagtggaatcatactcaattttttttgtatagcctgctctgttcatataatactatattgtagcatctagtataagcaaagattaatttttgtagactttgcttttatcctgaaattttgtggtagctggtttaatggaaagacaatttctgtgacgtgttttgtcagttagggattgaccctggtaaaatattgctggataacaacaagcaatgtaaaaatacatttgttccataagataacctccgtgaaggtagagacttggtctgttttgtttattgcaccgtgtcctgttctgggaagagtgttagactcatagaagatgatcaagaaatattttttgaatacatcaataacattctctaacatgtgggtatcctaaaggtttatttttaaagtttattgattagaattcagaagatattttcccagataaaataatagattgctagctgtcttgaaaatgtaatttatatttaatttgaaatgtcaggtttttgctattttttccattaagtagagatagggtttttaaaaattacatgtgatgttttaagtattctggttttgcaacaattactagatagaaaatgtaacaacagatcctattaataatacttccaataatacatataaaatacttgtctaaaagtaaccctccttaaaaaaacaaagctggccaggcgcggtggctcacgcctgtaatcccagcactttgggaggctgaggcaggcggatcaagaggtcaggagttcaagaccagcctggccaacatagtgaaaccccatctctagtaaaaatacaaaaaattagccgggtgtggtggcaggcgcctgtaaccccagctactcaggaaaatcgcttgaacctgggaggcggaggttgcagtgagcggagatcgcaccactgtacttcagccttgggcaacagtgcgagactctgtctcaaaaaaaaaaaaaaaaaaaggcaataggattaggtatcaacttaatgaaaacttcgtgacagcactttcttgaaaaagactgtggaaaccaaagttagtaaactcctgtttctgcctgggttcggaaaacataaagatgataaagatgtttaagtattcctttttttttttttttttttttttgagacagtgtcttgctctgtctggagtgcagtggcacaatcacagctcactgcagccttgaactcctgggctcaaataatcctcctgcctcagcctcctgagtatctggaactacaggagtgcaccattacactcggctagtaatttgattggttaagaacattaactataactcacacattttcctgaccacatttgcttaggacaaaacagtaaaagacatgagtgtagatgaaagcgataagggaactaatcttaaacactgaacctcttttcagcaaattggctttctagtttctcagctctctctttacacctctaaatctctttcctggcaagatcatttatttgccttggtttatggtgatactcttcattgttatactggtgggtgattgttttaattgatagctgtttttttctacttcaggaagatgacactgctggctctgctggctctgatgtttaccttgtggctaatgcctgtgtttgcctgtgttcacatttattccacgattcatttgttaacatttactaagctgcttttctgtgccaggaacttggctagataaataaatggttgtttttgtacacagaattagctgtcataatcagttactgtagcatttattcttgcaaaaatatatatttatacttcaactagtgatcgaatctcaacttattaattcatacattcagccagcacataattgaatacttcttatgtgtcagaaactgttctaggtgcttgggatgttcattgaacaaaatagacaaaagtctccgcctctatggaacttactttccagtgaaggtgtggattggtgggatagaaaataaaataatcaagtaagatatgtacttaggctttcataaaaatacagcagggcaagaggaccaagatggaggcagtgatcagggaatctcaatgagggtgagactgcgacaaagacttgaaaaaggtggagaagcaagccttgtgggtatttagggtagcagtagtccaggcaaggggaacaactagtgcaaaggctctaggaggcaatgtgtttgaagtgttttaagaacagtaaggaggctagtatggttagaacagaatgagcaaagggggcaaagtggtagaaggtgagatcaaagaggtaatgaggccattgtggaggcccatatggactattggaagggctttggcttttactctaaatgaggcaaaaaccattttaagcagagaggagtgatatgacttgatttcttgttaaaaggattattctagttgctgttacagaaaaagattacaggggtgcaaagaaacagggagacaaaagaatataagattttcactgtaacttatatctagtatgcttgcttatacttgaaaatgcatatccagataattgtagtaaattcaaatattatgtttatttaatagtactaacattgatatgctggttaattatgattaggagcactaataaagcacaaatcagggattcccaaaaagaatgttgaaagggcagtcagcttttcctgtgccagaaatcaaagtcatagcagatttggggcaaatatgtcaaagtcaaacttacgcacatcactactgagaagacaaagatgaatgtgtgacagtttcctgcccccaagaatctttaagcattgtgaaggaagattaatatagccaaataactagagtgatcagttctaccagagaggaccagttttggaagccagaggaaaaaaaaaaaaaacagaaacaaaatgatgtttgaattaaatctttaaaagtttctcttataaatttaccaagccacatattgggaatggtaccccaggcagaaggagtagagtaagcaagccagaaaggaaatactatggtgcttttgagtaactgcagtgtggctgaagaatgtggaaaatgatgaggataaagaggtggacagggaactaggtaagggagggcttccttttaaataattagaccttgtcctgtgtacatttaatgggattttaatcaggccataatgccaaatttctttacttcggaaggatctttatggtgatggtttcagaaagaaattaaagcagagtaacagtggttagcaataatgatcagctagtggttcccaaacttacgtatcatatgcatcttggaagtttttaaaaactcagattttgggatcctgacttagatctactgaatcagaatttacagattcaaattcccagtgaggcctaggaatttgaaatgttgaatgtccttcacgatgcagctagacaagcatttgggaataaagcattaggtgactatttcagtagactaaggagtgggaggccatttaagctcaaaggctattctacttctcactatatttctagtacctagcacagtgcatggtacttgatagatgcatcctttctcccatacctcgccctacacatctcttcatgtgtatccttattaatatcctctattataaactggtaaacatgtttccctgagttctgtgagctgctccagcaaagatgggtttgtgagaatcccaacttttgaagcctgtcagtcagaagttcctgaggccagacttgcaactcctgttgagggggcagtcttggggactgagccctcaacctgacactgtctccaggtagatagtgttagaattgaattgaaggacacccagttggtgtccgctgcagaactgattgctcacctggtggtggagagaacccctcctctcccgatagggttgcagaagttgtcttctgtgttgttgattgctgtggtgtgggagcagaggggggaaaaaagctgttggagagttttttccaaaacaataggagattatttagatttataaaaatagaatcaaagtagattaactgagcacattgtgaaatatagagtagagctgtgtgtaaggagtatatcttaatgtcaagctgacaccaaattgaatgtttgctggaacgttcaaaaatctaagcttcccaaatctgtgaaaacactcaggttagtaaacagtcttatgcaaacagcaagacaatgctcaaagccatttaaggaaaaagaacagtaactgaattctcttatggaaatgtgagatgttgttttagtaagtactgatggtgttatactttttgtttattcgtttgctggtatttcagttcctaaaattccttcaaatatgctgcaaaatacaaaccaagaacttggtggattttccatttgttttcctgtgggaaatgatggaattaaaaaccttgaggattagaccttgagagttaccttccagtgtttatgccaccattatacaaaattctggaggacaaaacccttcccacttaaaaaccagttagtttcagaaaatcacctcatgttaggagactgcatcattatagtatgtgtgttagctttaggtatagatctaaaatatttttaatattttaaaaacttaagcctttcttcattaatttggcctaatacaagttagaataactttaaaaatgagtacaaacaacaaggaagggccaggcgcagtggctcaacgcctgtaatccgaacactttgggaggccaaggtgggcagatcacctgaggtcaggagttccagaccagcctggccaacataatgaaaccccatctctactaagaatacaaaaattagctgggcgtggtggcacacgcctgtaatcccagctactcgggaggctgaggcaggagaattgcttgaacccaggaggcagaggttgcagtgagccgagatcgcgccattgcactccagtctgggcaacaagggtgaaatgccgtctcaggaaaaaaaaaaacagtttctgtgactgctagacaaatgttgagcaagtaaaacaccaacaatgttgaacttagatattgaaatagctgctctgtacaaataaagtctactgggagtatagactgaattaccatcttttgactctttcgccataatgattggcattaccggaagggattaccttgctttgaagagctgctggacagtagagcagagagcatctattaccattgtaggtgcctttcagttaggattttggatttataagcaaactccaagaaagagcctggttctgagtttctctgaatagcttaggtcaagtcctaaattctgaagccaactcctataattccttctttatgtctttggcatgtgaagtaggcaaatttcgaactttataataatagcctagacttacaaatacttgccttggtaatcaggatgagtttttgagagacaacatagtctagtgttaatcgcgtggacaccagactgcttgagtgaaatacaggttctaccatttattaacggagtaatgttgggtaagctatttagccagggtccttatctgtaacatggtgataataataaagattaaataataggtgaaaaatgtttagaataccactgtgttattagtaagcaccatgcataggtgtttggatttaaaaatactggcaaaggccaggttgggtggctcacacctataatcctcgcactttgggaggccaaggcagaaggatcgctttagcccaggagttcaggaccagtcgaggcaacatagattccgtctctgcaaaaaatttaacagaattagttgggcatggtagcgtgtgcctgtagctacttgggaggctgaggtagggagggggaggattgcttgagcccacgatttcgaggctgcagtgagcttatgatcatgccactgtactccagcttgggtgacagagcaagactctgtctctaaaataaaatgaaaataaaactgcaggcaaaaatgccaactgaagagtgaacatgaacttttctttgcatttttcttgggcctgagactttaagaagtgcagggcagttaaaatgatgagatataattctcacctatcagctcagcagaaattaataagattaaaaagatgcgtaatatataatattgcagagtgcatgggggaattgatatacacattcatgaactggcagagacaaaaatgggcacagaaccatttggaaagctattgtgtattttaaaaaatttcagtagcacattttttatatcatgaaatttcacttcagaatgtcagtcctgtagaaatactgacgcaagtgcaaaaacaacaaaaaccaacttgtaccttcaaggccagaaagagttatttcaccaaataacataattgaggtacattaactttattagaagtaaatctgataatctgctcacattttaaatagttatggtttaacttcagttcttgaagtcacatatttttacaattaggaatgctaacaggctttttgtgcaatacgaaaagatgactttaaatgcctacaattattttgtgtccttttatttttttttaatttttactgacctactacaaagcactaaatattttatgttcttaatctgaagaacaatagacattctctataaaacaactcttgcttattcatgaactttgtacacaagaagcttaataagacgggctcaaaattatttttctaaatatatttcctatacaaaataatttcaagatataattgttacttttgtgtctaatactgtatgttaaataataaaatggtaagcatgtaaaaactacaataccacaaagattgagctattttgccagtagtatactccaactttagttctagaacagttgtagaaatgggtaaacaaactgttttaactgtactcttaactgaaatatagtaccttatgcagtagcagaacatatcagcagaagaacttcacttgacctgtacttaaaaacaaaacagatgcaatttataaaatttagagaaatatagtgaccttatttgcatgtggaaaatgtacttctttctgatctacatatcttctgttgtgcaatgtaagcagtaaaacaaatagtacaggattcatctctgtgggacctagaccccctggtctaacaaataattcttggtcagtactgtaattctgtggtataaaactgataaaattagccttcctgtgactagacaagaagccgggcagtttaaatgctgaaactcacaagaacttcagaagctttagctttaagctttaagcttacttagaaatgttataagacctccagtagtcacatatgaagaatatcatgaagatttttccattaaatctttattatagatcccttgattggtttctgtctagactcattgtgtgataaaggacataataatttttatcaccttcatctaatataggtttgtcaactctatattagttgttttcttgaaggctggttttcttccaaaattcagtcttattttcagtctacactagcttttaaatatactgtcctttagatgctttatctaacctcaaatttctaatggatttgtcttagacacttattgccactccttagatagtcattgctatctttgaagttctggacgatacgtgtattacagaggaactggagacattccatcaccatagttagcttgattggataccctttaaaagcatatactcgcgcctgtaatcccagcactttgggaggccgaggcgggtggatcacttgaggtctggagtttgagacaagcctggccaacatggtgaaacctgtctgtactaaaaatacaaaaattagcctggcatggtaccacatgcctgtaatcccagctactcaggaggctgaggcaggagaattgcttgaacctgggaagtggaggttgcagtgaaccaagatcttgccattgcactccagcctgggtgacaagagcagaactccattaaaaaaaaaaaaaagcatatatagcacatattataaggttttcaattttttcaccaagtgtttcatttgggtagtcatttattggtagtttacatcagttgagtggttcagaaaaaatacagtaagttgcttataaaattctgaacactttggccaggcacaatggctcaagcctgtaatttgagccctttgtgaggctgaggcaggagaattgcttgagcttaggcgttcaagaccagcctaggtaacaaagaacgcctggaatgattgtggcatttgaactaatattcaggtttaacaagagataattgaccatcactctattttagaggctttatttgaaccagatagaaatctatttcccacagctatcactgcctgtcacctacaacttaagggggttggggaggaagtgagagattttctgttagggccaatagggacctgctagatacccccccatcctgggaatggtgtatggaactccagtgtatgctggagttattatcatcatacttgtttttttattttactcttctgcttatacagatcaagtcttacgttttatttttaagtttaaattgaaaacatttacagagaacaatgcagtgaaatgaaaaaattacagactgctggcatttgcattttcatgtagcctcagtgactaatttttttttattgtacagcattgagaaaatcctagttcatataactagttatagttcatatagattcatataactagttttaagtgataatagtttcttcctttttttcctccaccatctaaccagatgaagataatagtttttaatagctcaccgtaaatttcaaggtactcaagttaaattgatctagatgcttgagttgaaatttttctatcaaagttcaataacatgcttacattccttattaaagtataaaagtcctataaacacacaaacttgagtaagtactaaaactagtatcagtattgtcacaatacaacatgttatattgtaacaagagcatttgctgagaactgtgcttgttactccagaatgttgcttctatggttgtacctttcaactttgcagatcatttggaaggaggagagatttggggtggagacaattcggtacttcattcacaggatgtaaggaggattaagtaaaataatgctggctaaaagtccttatttagcatactgcccaatgctcactaaatcataatagctgtttttaacatttggtgaagaatctatttaacaggagtgagttgaggggcataggagatcatgtgagtgtttaaagtagaagcagcattccccattaagaagagaaatactgtggaagagcaaagactttaaaacacctgggttcaaatcctatttgctacataatggctacttttaacctattgaacgccagttccctcatttgtaaaatagggacaatatttaacctatttacaggttgtgagagaactaggcacctagtacagggtaatgttggcacatggtaacctttaataaactgttgctattcaacaagctattagatgtcactaggcagttaagcaaaggaagacagcttttgcttggtgtgacaatgaaaatctttctgatttccttcttggaagagttccctgaagatatgtcattgtattgacacctttatttttgctaacctatccctctaaattctggatattgtgtgtgccacagctttttttcttccatattcctgcatttatttggcacctgttgtgccagtaatagataaggggctgctaagggaggaggcaacctgcactggcttatagctgctaatgtcagttcctatagcttatcgtcagtgttattcatgtggtaaaagggtgagaaagtactggagtctaaagaaacaagtagaaatcagtttgtagctattaccgttctacctgctaacaactcctgttttcaagttattatgtacaactttaggtagtttctctagccttaatcgtggtttctctgtattgagactacttttgaattctatgaagtacagccttagatgtacaggctactttaaatttttgcctaaaataaaaacattctctccaattacatatgctggggaggaaacacctgcttccgacaggtttaaagcttggttttggactttttgtgagagttccttatgtgtgcagtaatccaaaatttgtatagttgccctttataaaagtacattaatctagtagacaaatctccatgtaacttaattacatggcatcttctaatccttctgtgataagcagaaatgtaaagttttattcaagttaaggcaaactaacttgtatacactttccatctcgtgtttttcttgttgttgttaagtaggataagttctgaacgtcgaaaagaaaagtctcgagatgcagccagatctcggcgaagtaaagaatctgaagttttttatgagcttgctcatcagttgccacttccacataatgtgagttcgcatcttgataaggcctctgtgatgaggcttaccatcagctatttgcgtgtgaggaaacttctggatgctggtgagttattttacaagggtataaataggcctgaaaattagaagttagaagtaaatagaaattatttttagaaggtggtcgcaatgttttgattttgtatacctctttatattgtgatatgtacacgtttaaaaatttttctgtaattctcactatttttatcaagcttcatttttttctcatcagttattctttgaaataatcattctttatgcacataatttgttttgctttattctcttaaacatactctcaattcttttctaatataacatcctttttattacctgcttttaaagctttagtcaggaataagatactggcttttcccctcccccctttttctcctgttccatctacctttcttcctttaaaaaacatgactcaggccgggcgcggtggctcacgcctgtaatcccagaactttgggatgctgaggcgggtggatcatgaggtcaggagttcaagaccagcctggccaagatggtgaaaccccatatataccaaaaatataaaaaattagatgggcacgctggtaggtgcctgtaatctcagctactagggaggctgaggcaggagaattgcttaaactcagagggcggagcttgcagtaagccgagatcaagccactgcactccagcctgggcggcagagtgagactccatctcaaaaataataaaataaataaataaataaaaaacattactcttctttcttcttctatggtttgctttgctgcattactttaatcatgaaaagcagctggcacatctaattatagtttttctagcttctggcctgcacttttctgtgttgaaatggctgtatatattaaataaagtgtctgcgagaaaactttgtaaaaacatctaaatattatatcatttaagtacaactttttaactaattattttcctcttcttgtgccctttttaggtgatttggatattgaagatgacatgaaagcacagatgaattgcttttatttgaaagccttggatggttttgttatggttctcacagatgatggtgacatgatttacatttctgataatgtgaacaaatacatgggattaactcaggtaaaatgcacacatattaagagctcttctatatgtttttatgattttatgatctagccctaatttttaaaaatgtgtttacagtttgaactaactggacacagtgtgtttgattttactcatccatgtgaccatgaggaaatgagagaaatgcttacacacagaaatggtaagaaaagtctgttgtttgatttaatgtgacaggtggttttacataataagatactattgctaattattaaactttgctattgtacttacccaaggcaaaatgttatttcatgtttaataaaatgtctattctttgttaaaactattattttagtttttaggaatttcattttgaaagcccacctaattgcataaataattgtgtgggtgtgagaaataaaatggaaaagtaaaatcatgaccaagagagttacaaataactttttttttttttttttaagatggggtctcgctcttttgcccatgctggagtgcagtggcacaatcagctgactgcagccttgaccgctgggactcaagcgatcctcccacctcagtctcccaagttagctgggaccacagacgcgtgctaccatgcccagctaaatttttaaaaattatttgtagagacaaagtctcactatgctgctcaggctggtcttgaactactgggcttaagccatcctctcacctcggcctctcaaagtgttgggattacaggcatgagccaccacgcccaggctaccttttttttccttttctttttaaattgtgataggggttcttgctgtattgcccaggctggtcttaaactcctggactcaagtgatcctcctggctcagcctcccaaagtgctaggattataggcatgcgccaccacacctggtggagttaaaaattaaaatacaccattaaggcaaggagaaattataatacaaatggcagataataggactttagacagtcattaaagttgaggtgccagtttgagtctaaggcccaataaaaaaagttcaccagaattttaagacaaacaactgcttatttgacttctttggatgttctcaataattcgagaccgtgtagttagattataaagtattacattgtggatgcccacatattaacaaaaatagagagtaagacctctaattcttaggaattaattgttaaaaataatcaagtgttccaagattttttggaaactacctcttgaattaaaaaattaaagtctttctacatttttatcttgttaaacagtgtatactgatcataattatttaaaaaatcatgtgttctaagatttttggaaagtacctcttgaattacaaaaacaagaaagtctttccacatttgtgccttcttaagcagtgtatactgatcataattgaacttttcttcatgatggaaagttaccacaaggaaaatttcttatgttctgctgttctttgttgctctccaatttaagtgcatacgtttgtttgcttctatattataaaacctcaaatttactttttgtataatttttgaggttttctttttcatctcatttattataataatagctaacctccattgagagaatgctgtgtgccaggacactgttcttcctattttatatgcttttaactcctttattcctcacaacaaccctgtgaagttaactgttagacaatttctattttactaggaaactgaggtacagagttactaagtaactttcccaacattatttggttagtaaatggcagagcttgggctgaacttcagtagactggcttcagagtccacgctcattagtcctttggagcgcttttcatattcttgaattctcacattctgtcttttttcactctgtcagcaggacctgactcctgtttttaaatttcatattgtgtttttactgttaatttggaaaacaaatgcatactttttagaattctgtataaaggaggagtaaatatgctgtgaacaaggacctaagtgggttgtcaatgagtttaatatatgagttctaatgtgcagagttgaggtttatattgactgctcagtgcttccctggggctagactataaatggatggatattaggaagtcttgttctgatttggtaatgatgttaatgcattattctaaatcagatagtcttaatatagtttaaatgtatgtttcgaaccaaatgttcttttttaaagcacacaaacattttgaaatcattactaatgtggttaatgaattattgatgttccattgggaaactaaaatgcagatttttctcttttagaaatcagggactattgcaaagcatcacattttagtgatacactgagagccagtggtgtgtttatacaaatagtcctattttccaaataaattctagaaaaatgctttagaatttataaattatacaaaatatgacttatttttagagagtttaaaatttaggtttttttaatggtttgtttttgtttgtttgttttttgttttttttttcctcattaggaaaacactagtacttttcagttaccttgatttttaaattaatctgcaggtccccattcaaaggccttgggttcctttcaaaggtcagtataattcaagcttagtttatgaaggactgaacatacccaaaggattttgcatgtggatctttactgccactaccacaaccatcaacacctacacacacacgacacacacacattctctctctctctctctctctctctctctctccccctccctcccgcactccttcccttccccctcctttgctctcatggcatcttttaaaaatatactcttaaatccttccagggagggcaaattcacttcttaatctaagtaaacccaaatggcatgcatcagcaccaggactgcccatctttcctagttccattattcatagagtataggctggaattcatcttgttcctcaagagtccagcatttctagttaaccatgcctacatttaaacttactctcatttcttttctactttacagtgttttttcaatatactagcattacagtttccagatttgatttctctcctgtcttatttccatcagttttcaagtctattaagattctacctcttcatttgtcttttgccaccattcttttccctcatactctactggctcagccctctcattacagtcacctaattctaacatatatattgctgctaagttaattttccttaagttactgattgtgcttttttaaagccccttgttgaatatttaggcaggactccatgtggacatccacagccctccgtggtacagccctaaccttcccttctagctttgccttactactcttctacgtgtactctacattgtggacaaactactatatgctgtttttcaaacatgtcctatttttcctacctctgtgcttttcattctcttacttctccttggaatacccttctaacccatctctacttactgacattctaatgtctctttttctaagcaagacttcttgatttcccttgactagaaattatcttctaagctctccctatccttctttaaagcatttttataagtctcaagtaccaactctacattgtgtttttgttgaccttactatatctactacatttttaacttcttcaggaaaggtggcgtatcttactcatctttgtattgcctacaatatctagtccaggttctgaataataaatatttttatatgtgttctgaagcacactgaccaatgaagataagaaatcaagaggctagttccttattttttttaatttttttttttgagacagtgtctcactttgtcacccaggctggagtgcagtggcacaatctcagttcactacaacctctgcctcccgggttcaagtgattctcacgcctcaacctcccaagtagctgggattataggcatgtgccaccacacctagctgatatttatatttttagtagagatggggttttgccatgatggccagcatggtctcaaacttctgtcctcaagtgatcttcctgcctcagcctcccaaagtgctgggattacaggcatgaggcataagccactgcgcccagcaagatgctcttttctcagtcacctaaatataatctcatttttagttatagaaggtttgaaattggagtgaatagactttacttaattctgactttatttctgtagctttttttttttgagatggattctcgctctatatcccaggttggagtgcagtggcacagtctcagctcactgcaacctctgcctcccacgttcgagtgattcccctgcctcagtctcccaagtagctgggattacaggcacccactatcacacccagctaatttttgtatttttagtagagacagggtttcaccatgttggccaggccggtttcgaactcctgacctcaagtgatcctcttgcctcagcctcccaaagtgctgggattacaggcatgagccaccgtgccctgcctatttctgtaacttttgataagtcatttgatctgttgttgttgttttctcatagtaacaaagtagaagtaattttctgcctgctttactagataaattaaggggaaaaaaataagatacgtaaaaatgttatttgttattaaaaagaaagttgttattttaaaggttctataaagacatagagtgcttattagaaattgagctaacacattcaggaaaggataggaagagtttgctgaagttctttctttagggattcttgtgtaccgatagcacagttaaagagcaaactcataccatttttatatttctgtgtatttgactaagcttactggcttcaatgattaactgttatcccaaatatggattatctttcagccaactcagggaatcacagctactgagtagtgtgtgtcagatctcttgggtgtgctggagtgagtaaaaggggaatgaattactgtgttcatgctgagacttaattgaacgggtattcagttgatctaggtgatgggcactttgttacttttattgtaacaaatttgtatatttagttgctttaaaactttatttcatgctttcattaggccttgtgaaaaagggtaaagaacaaaacacacagcgaagcttttttctcagaatgaagtgtaccctaactagccgaggaagaactatgaacataaagtctgcaacatggaaggtaagtgaaaattatttgtgattgattatacactttatttatacatagacattgtagtattaagataactttagaattgtgagggaaggtttacagttccatggtgtttggttatgtaacatttatatcttcaactcatttgcatgtgatctccaaaatgcagaaccgtgtagtaatttgccaatttgaggcacaaacttaaattacgtgaattgtggcactggtgttccaggcttaatcagttggctttgccagccacacaatatttgaatcctgatagggcttaattttctattaatcatggttttatatctttgttcaatgttgaaacatagtcatcagtgcaagaaataactatcaaacagccatgatgatgagatgaatgaaaaagcagcctagactttatacgaggggaattttttaaagagtaatgtataggccctgggcaggaagtaggtcataggtggtatcataggaaaaatgttcattgattttcaaaaacgtgattaatccactagtgacagtaaattttatcaaagcttactggccatgtcagactcaactacttatctctgctttttttttccctagcattgtaaatattttttttaactgctttgttcttcatacacaggtattgcactgcacaggccacattcacgtatatgataccaacagtaaccaacctcagtgtgggtataagaaaccacctatgacctgcttggtgctgatttgtgaacccattcctcacccatcaaatattgaaattcctttagatagcaagactttcctcagtcgacacagcctggatatgaaattttcttattgtgatgaaaggtaaattagatctaaaatgtgaatttgaaatttttaattagtctacagcattactgaatattcaccatagcaaagattcagcgctggccatgcatggtggctcacacctgtaatcccagcactttggaaggctgaggcaagcggggggtggatcatctgaggtcaggagattgagaccagcctggccaatgtggtgaaaccccatctctactaaaaaatacaaaaattagtgggacgtggtggcaggcactactcaggaggctgaggcaggagaatcgcttgaacctgggaggtggatgttgtggtgagctgagctcacaccaccacactgcaagcctggatgacagagcaagactcccatttcaaaaaaaaaaaaaaaaattactcaatgttaaactatactttccactaaattgaacagaatgatacatcctataatattagattaactttgtaaattaattcagccacatttattgaacatttactctgtactatgaacacttactttactaggtgctatccagaagttaagatgagtctttttttccccaataggggctctacttacttagagaatttcaaagatatgcagtgtgtattttgagcaaagatagattacct

SEQ ID NO: 378 - DNA, 3946 bp, Homo sapiens
  source 1..3946: mol_type = genomic DNA
agtgcacagtgctgcctcgtctgaggggacaggaggatcaccctcttcgtcgcttcggccagtgtgtcgggctgggccctgacaagccacctgaggagaggctcggagccgggcccggaccccggcgattgccgcccgcttctctctagtctcacgaggggtttcccgcctcgcacccccacctctggacttgcctttccttctcttctccgcgtgtggagggagccagcgcttaggccggagcgagcctgggggccgcccgccgtgaagacatcgcggggaccgattcaccatggagggcgccggcggcgcgaacgacaagaaaaagataagttctgaacgtcgaaaagaaaagtctcgagatgcagccagatctcggcgaagtaaagaatctgaagttttttatgagcttgctcatcagttgccacttccacataatgtgagttcgcatcttgataaggcctctgtgatgaggcttaccatcagctatttgcgtgtgaggaaacttctggatgctggtgatttggatattgaagatgacatgaaagcacagatgaattgcttttatttgaaagccttggatggttttgttatggttctcacagatgatggtgacatgatttacatttctgataatgtgaacaaatacatgggattaactcagtttgaactaactggacacagtgtgtttgattttactcatccatgtgaccatgaggaaatgagagaaatgcttacacacagaaatggccttgtgaaaaagggtaaagaacaaaacacacagcgaagcttttttctcagaatgaagtgtaccctaactagccgaggaagaactatgaacataaagtctgcaacatggaaggtattgcactgcacaggccacattcacgtatatgataccaacagtaaccaacctcagtgtgggtataagaaaccacctatgacctgcttggtgctgatttgtgaacccattcctcacccatcaaatattgaaattcctttagatagcaagactttcctcagtcgacacagcctggatatgaaattttcttattgtgatgaaagaattaccgaattgatgggatatgagccagaagaacttttaggccgctcaatttatgaatattatcatgctttggactctgatcatctgaccaaaactcatcatgatatgtttactaaaggacaagtcaccacaggacagtacaggatgcttgccaaaagaggtggatatgtctgggttgaaactcaagcaactgtcatatataacaccaagaattctcaaccacagtgcattgtatgtgtgaattacgttgtgagtggtattattcagcacgacttgattttctcccttcaacaaacagaatgtgtccttaaaccggttgaatcttcagatatgaaaatgactcagctattcaccaaagttgaatcagaagatacaagtagcctctttgacaaacttaagaaggaacctgatgctttaactttgctggccccagccgctggagacacaatcatatctttagattttggcagcaacgacacagaaactgatgaccagcaacttgaggaagtaccattatataatgatgtaatgctcccctcacccaacgaaaaattacagaatataaatttggcaatgtctccattacccaccgctgaaacgccaaagccacttcgaagtagtgctgaccctgcactcaatcaagaagttgcattaaaattagaaccaaatccagagtcactggaactttcttttaccatgccccagattcaggatcagacacctagtccttccgatggaagcactagacaaagttcacctgagcctaatagtcccagtgaatattgtttttatgtggatagtgatatggtcaatgaattcaagttggaattggtagaaaaactttttgctgaagacacagaagcaaagaacccattttctactcaggacacagatttagacttggagatgttagctccctatatcccaatggatgatgacttccagttacgttccttcgatcagttgtcaccattagaaagcagttccgcaagccctgaaagcgcaagtcctcaaagcacagttacagtattccagcagactcaaatacaagaacctactgctaatgccaccactaccactgccaccactgatgaattaaaaacagtgacaaaagaccgtatggaagacattaaaatattgattgcatctccatctcctacccacatacataaagaaactactagtgccacatcatcaccatatagagatactcaaagtcggacagcctcaccaaacagagcaggaaaaggagtcatagaacagacagaaaaatctcatccaagaagccctaacgtgttatctgtcgctttgagtcaaagaactacagttcctgaggaagaactaaatccaaagatactagctttgcagaatgctcagagaaagcgaaaaatggaacatgatggttcactttttcaagcagtaggaattggaacattattacagcagccagacgatcatgcagctactacatcactttcttggaaacgtgtaaaaggatgcaaatctagtgaacagaatggaatggagcaaaagacaattattttaataccctctgatttagcatgtagactgctggggcaatcaatggatgaaagtggattaccacagctgaccagttatgattgtgaagttaatgctcctatacaaggcagcagaaacctactgcagggtgaagaattactcagagctttggatcaagttaactgagctttttcttaatttcattcctttttttggacactggtggctcattacctaaagcagtctatttatattttctacatctaattttagaagcctggctacaatactgcacaaacttggttagttcaattttgatcccctttctacttaatttacattaatgctcttttttagtatgttctttaatgctggatcacagacagctcattttctcagttttttggtatttaaaccattgcattgcagtagcatcattttaaaaaatgcacctttttatttatttatttttggctagggagtttatccctttttcgaattatttttaagaagatgccaatataatttttgtaagaaggcagtaacctttcatcatgatcataggcagttgaaaaatttttacaccttttttttcacattttacataaataataatgctttgccagcagtacgtggtagccacaattgcacaatatattttcttaaaaaataccagcagttactcatggaatatattctgcgtttataaaactagtttttaagaagaaattttttttggcctatgaaattgttaaacctggaacatgacattgttaatcatataataatgattcttaaatgctgtatggtttattatttaaatgggtaaagccatttacataatatagaaagatatgcatatatctagaaggtatgtggcatttatttggataaaattctcaattcagagaaatcatctgatgtttctatagtcactttgccagctcaaaagaaaacaataccctatgtagttgtggaagtttatgctaatattgtgtaactgatattaaacctaaatgttctgcctaccctgttggtataaagatattttgagcagactgtaaacaagaaaaaaaaaatcatgcattcttagcaaaattgcctagtatgttaatttgctcaaaatacaatgtttgattttatgcactttgtcgctattaacatcctttttttcatgtagatttcaataattgagtaattttagaagcattattttaggaatatatagttgtcacagtaaatatcttgttttttctatgtacattgtacaaatttttcattccttttgctctttgtggttggatctaacactaactgtattgttttgttacatcaaataaacatcttctgtggaccagg

SEQ ID NO: 379 - protein, 850 aa, Homo sapiens
MSSQCRSLENKFVFLKEGLGNSKPEELEEIRIENGRISSERRKEKSRDAARSRRSKESEVFYELAHQLPLPHNVSSHLDKASVMRLTISYLRVRKLLDAGDLDIEDDMKAQMNCFYLKALDGFVMVLTDDGDMIYISDNVNKYMGLTQFELTGHSVFDFTHPCDHEEMREMLTHRNGLVKKGKEQNTQRSFFLRMKCTLTSRGRTMNIKSATWKVLHCTGHIHVYDTNSNQPQCGYKKPPMTCLVLICEPIPHPSNIEIPLDSKTFLSRHSLDMKFSYCDERITELMGYEPEELLGRSIYEYYHALDSDHLTKTHHDMFTKGQVTTGQYRMLAKRGGYVWVETQATVIYNTKNSQPQCIVCVNYVVSGIIQHDLIFSLQQTECVLKPVESSDMKMTQLFTKVESEDTSSLFDKLKKEPDALTLLAPAAGDTIISLDFGSNDTETDDQQLEEVPLYNDVMLPSPNEKLQNINLAMSPLPTAETPKPLRSSADPALNQEVALKLEPNPESLELSFTMPQIQDQTPSPSDGSTRQSSPEPNSPSEYCFYVDSDMVNEFKLELVEKLFAEDTEAKNPFSTQDTDLDLEMLAPYIPMDDDFQLRSFDQLSPLESSSASPESASPQSTVTVFQQTQIQEPTANATTTTATTDELKTVTKDRMEDIKILIASPSPTHIHKETTSATSSPYRDTQSRTASPNRAGKGVIEQTEKSHPRSPNVLSVALSQRTTVPEEELNPKILALQNAQRKRKMEHDGSLFQAVGIGTLLQQPDDHAATTSLSWKRVKGCKSSEQNGMEQKTIILIPSDLACRLLGQSMDESGLPQLTSYDCEVNAPIQGSRNLLQGEELLRALDQVN

SEQ ID NO: 380 - DNA, 3470 bp, Homo sapiens
  source 1..3470: mol_type = genomic DNA
atttgaaaacttggcaaccttggattggatggattcatatttcttagtatagaagttcttgatataactgaaaaattaagttaaacacttaataagtggtggttactcagcacttttagatgctgtttataatagatgaccttttctaactaatttacagttttttgaaagataactgagaggttgagggacggagattttcttcaagcaatttttttttttcattttaaatgagctcccaatgtcggagtttggaaaacaaatttgtctttttaaaagaaggtctaggaaactcaaaacctgaagaattggaagaaatcagaatagaaaatggtaggataagttctgaacgtcgaaaagaaaagtctcgagatgcagccagatctcggcgaagtaaagaatctgaagttttttatgagcttgctcatcagttgccacttccacataatgtgagttcgcatcttgataaggcctctgtgatgaggcttaccatcagctatttgcgtgtgaggaaacttctggatgctggtgatttggatattgaagatgacatgaaagcacagatgaattgcttttatttgaaagccttggatggttttgttatggttctcacagatgatggtgacatgatttacatttctgataatgtgaacaaatacatgggattaactcagtttgaactaactggacacagtgtgtttgattttactcatccatgtgaccatgaggaaatgagagaaatgcttacacacagaaatggccttgtgaaaaagggtaaagaacaaaacacacagcgaagcttttttctcagaatgaagtgtaccctaactagccgaggaagaactatgaacataaagtctgcaacatggaaggtattgcactgcacaggccacattcacgtatatgataccaacagtaaccaacctcagtgtgggtataagaaaccacctatgacctgcttggtgctgatttgtgaacccattcctcacccatcaaatattgaaattcctttagatagcaagactttcctcagtcgacacagcctggatatgaaattttcttattgtgatgaaagaattaccgaattgatgggatatgagccagaagaacttttaggccgctcaatttatgaatattatcatgctttggactctgatcatctgaccaaaactcatcatgatatgtttactaaaggacaagtcaccacaggacagtacaggatgcttgccaaaagaggtggatatgtctgggttgaaactcaagcaactgtcatatataacaccaagaattctcaaccacagtgcattgtatgtgtgaattacgttgtgagtggtattattcagcacgacttgattttctcccttcaacaaacagaatgtgtccttaaaccggttgaatcttcagatatgaaaatgactcagctattcaccaaagttgaatcagaagatacaagtagcctctttgacaaacttaagaaggaacctgatgctttaactttgctggccccagccgctggagacacaatcatatctttagattttggcagcaacgacacagaaactgatgaccagcaacttgaggaagtaccattatataatgatgtaatgctcccctcacccaacgaaaaattacagaatataaatttggcaatgtctccattacccaccgctgaaacgccaaagccacttcgaagtagtgctgaccctgcactcaatcaagaagttgcattaaaattagaaccaaatccagagtcactggaactttcttttaccatgccccagattcaggatcagacacctagtccttccgatggaagcactagacaaagttcacctgagcctaatagtcccagtgaatattgtttttatgtggatagtgatatggtcaatgaattcaagttggaattggtagaaaaactttttgctgaagacacagaagcaaagaacccattttctactcaggacacagatttagacttggagatgttagctccctatatcccaatggatgatgacttccagttacgttccttcgatcagttgtcaccattagaaagcagttccgcaagccctgaaagcgcaagtcctcaaagcacagttacagtattccagcagactcaaatacaagaacctactgctaatgccaccactaccactgccaccactgatgaattaaaaacagtgacaaaagaccgtatggaagacattaaaatattgattgcatctccatctcctacccacatacataaagaaactactagtgccacatcatcaccatatagagatactcaaagtcggacagcctcaccaaacagagcaggaaaaggagtcatagaacagacagaaaaatctcatccaagaagccctaacgtgttatctgtcgctttgagtcaaagaactacagttcctgaggaagaactaaatccaaagatactagctttgcagaatgctcagagaaagcgaaaaatggaacatgatggttcactttttcaagcagtaggaattggaacattattacagcagccagacgatcatgcagctactacatcactttcttggaaacgtgtaaaaggatgcaaatctagtgaacagaatggaatggagcaaaagacaattattttaataccctctgatttagcatgtagactgctggggcaatcaatggatgaaagtggattaccacagctgaccagttatgattgtgaagttaatgctcctatacaaggcagcagaaacctactgcagggtgaagaattactcagagctttggatcaagttaactgagctttttcttaatttcattcctttttttggacactggtggctcactacctaaagcagtctatttatattttctacatctaattttagaagcctggctacaatactgcacaaacttggttagttcaatttttgatcccctttctacttaatttacattaatgctcttttttagtatgttctttaatgctggatcacagacagctcattttctcagttttttggtatttaaaccattgcattgcagtagcatcattttaaaaaatgcacctttttatttatttatttttggctagggagtttatccctttttcgaattatttttaagaagatgccaatataatttttgtaagaaggcagtaacctttcatcatgatcataggcagttgaaaaatttttacaccttttttttcacattttacataaataataatgctttgccagcagtacgtggtagccacaattgcacaatatattttcttaaaaaataccagcagttactcatggaatatattctgcgtttataaaactagtttttaagaagaaattttttttggcctatgaaattgttaaacctggaacatgacattgttaatcatataataatgattcttaaatgctgtatggtttattatttaaatgggtaaagccatttacataatatagaaagatatgcatatatctagaagg

SEQ ID NO: 381 - DNA, 121 bp, Homo sapiens
  source 1..121: mol_type = genomic DNA
tttttcattttaaatgagctcccaatgtcggagtttggaaaacaaatttgtctttttaaaagaaggtctaggaaactcaaaacctgaagaattggaagaaatcagaatagaaaatgggtat

SEQ ID NO: 382 - protein, 35 aa, Homo sapiens
MSSQCRSLENKFVFLKEGLGNSKPEELEEIRIENG

SEQ ID NO: 383 - DNA, 14 bp, Homo sapiens
  source 1..14: mol_type = genomic DNA
atacacaggtattg

SEQ ID NO: 384 - DNA, 19 bp, Homo sapiens
  source 1..19: mol_type = genomic DNA
tttcttttcagaactacag

SEQ ID NO: 385 - protein, 15 aa, synthetic construct
GGGGSGGGGSGGGGS

SEQ ID NO: 386 - protein, 20 aa, synthetic construct
METDTLLLWVLLLWVPGSTG

SEQ ID NO: 387 - RNA, 20 nt, synthetic construct
  source 1..20: mol_type = other RNA
tcaccggagcgggatgcgga

SEQ ID NO: 388 - RNA, 20 nt, synthetic construct
  source 1..20: mol_type = other RNA
ctgctcaccggagcgggatg

SEQ ID NO: 389 - RNA, 20 nt, synthetic construct
  source 1..20: mol_type = other RNA
cactcccagggctgcgggga

SEQ ID NO: 390 - RNA, 20 nt, synthetic construct
  source 1..20: mol_type = other RNA
ccactcccagggctgcgggg

SEQ ID NO: 391 - RNA, 20 nt, synthetic construct
  source 1..20: mol_type = other RNA
gcgacgacagctgaagcaga

SEQ ID NO: 392 - RNA, 20 nt, synthetic construct
  source 1..20: mol_type = other RNA
tggagagccagcctctgccg

SEQ ID NO: 393 - RNA, 20 nt, synthetic construct
  source 1..20: mol_type = other RNA
ggagagccagcctctgccgg

SEQ ID NO: 394 - RNA, 20 nt, synthetic construct
  source 1..20: mol_type = other RNA
acatgagccagagaggggcg

SEQ ID NO: 395 - RNA, 20 nt, synthetic construct
  source 1..20: mol_type = other RNA
gaggcagcaagaacctttca

SEQ ID NO: 396 - RNA, 20 nt, synthetic construct
  source 1..20: mol_type = other RNA
tggcccacactcctggcggg

SEQ ID NO: 397 - RNA, 20 nt, synthetic construct
  source 1..20: mol_type = other RNA
cgttggcccacactcctggc

SEQ ID NO: 398 - RNA, 20 nt, synthetic construct
  source 1..20: mol_type = other RNA
tctccccaggtacaatggct

SEQ ID NO: 399 - RNA, 20 nt, synthetic construct
  source 1..20: mol_type = other RNA
cagttgttccaacctagcat

SEQ ID NO: 400 - RNA, 20 nt, synthetic construct
  source 1..20: mol_type = other RNA
ggccatgctgctggagacac

SEQ ID NO: 401 - RNA, 20 nt, synthetic construct
  source 1..20: mol_type = other RNA
tcacctgagcgggacacaga

SEQ ID NO: 402 - RNA, 20 nt, synthetic construct
  source 1..20: mol_type = other RNA
ttactgttccaccccaggaa

SEQ ID NO: 403 - RNA, 20 nt, synthetic construct
  source 1..20: mol_type = other RNA
tttaaacaggtataaaagtt

SEQ ID NO: 404 - RNA, 20 nt, synthetic construct
  source 1..20: mol_type = other RNA
gcttcagcgcactgagctga

SEQ ID NO: 405 - RNA, 20 nt, synthetic construct
  source 1..20: mol_type = other RNA
tgccaagcagatgtcaagag

SEQ ID NO: 406 - RNA, 20 nt, synthetic construct
  source 1..20: mol_type = other RNA
cttactatcatgatgagttt

SEQ ID NO: 407 - RNA, 20 nt, synthetic construct
  source 1..20: mol_type = other RNA
catatacctgagtagaaaat

SEQ ID NO: 408 - RNA, 20 nt, synthetic construct
  source 1..20: mol_type = other RNA
tcatatacctgagtagaaaa

SEQ ID NO: 409 - RNA, 20 nt, synthetic construct
  source 1..20: mol_type = other RNA
tgtttacagtttgaactaac

SEQ ID NO: 410 - RNA, 20 nt, synthetic construct
  source 1..20: mol_type = other RNA
tcattaggccttgtgaaaaa

SEQ ID NO: 411 - RNA, 20 nt, synthetic construct
  source 1..20: mol_type = other RNA
acacaggtattgcactgcac

SEQ ID NO: 412 - RNA, 20 nt, synthetic construct
  source 1..20: mol_type = other RNA
taacagaattaccgaattga

SEQ ID NO: 413 - RNA, 20 nt, synthetic construct
  source 1..20: mol_type = other RNA
aacagaattaccgaattgat

SEQ ID NO: 414 - RNA, 20 nt, synthetic construct
  source 1..20: mol_type = other RNA
tttcagaactacagttcctg

SEQ ID NO: 415 - RNA, 20 nt, synthetic construct
  source 1..20: mol_type = other RNA
agctcccaatgtcggagttt

SEQ ID NO: 416 - RNA, 20 nt, synthetic construct
  source 1..20: mol_type = other RNA
gagctcccaatgtcggagtt

SEQ ID NO: 417 - RNA, 20 nt, synthetic construct
  source 1..20: mol_type = other RNA
ttaaatgagctcccaatgtc

SEQ ID NO: 418 - RNA, 20 nt, synthetic construct
  source 1..20: mol_type = other RNA
tttaaatgagctcccaatgt

SEQ ID NO: 419 - RNA, 20 nt, synthetic construct
  source 1..20: mol_type = other RNA
accatacccattttctattc

SEQ ID NO: 420 - DNA, 20 bp, synthetic construct
  source 1..20: mol_type = other DNA
tcaccggagcgggatgcgga

SEQ ID NO: 421 - DNA, 20 bp, synthetic construct
  source 1..20: mol_type = other DNA
ctgctcaccggagcgggatg

SEQ ID NO: 422 - DNA, 20 bp, synthetic construct
  source 1..20: mol_type = other DNA
cactcccagggctgcgggga

SEQ ID NO: 423 - DNA, 20 bp, synthetic construct
  source 1..20: mol_type = other DNA
ccactcccagggctgcgggg

SEQ ID NO: 424 - DNA, 20 bp, synthetic construct
  source 1..20: mol_type = other DNA
gcgacgacagctgaagcaga

SEQ ID NO: 425 - DNA, 20 bp, synthetic construct
  source 1..20: mol_type = other DNA
tggagagccagcctctgccg

SEQ ID NO: 426 - DNA, 20 bp, synthetic construct
  source 1..20: mol_type = other DNA
ggagagccagcctctgccgg

SEQ ID NO: 427 - DNA, 20 bp, synthetic construct
  source 1..20: mol_type = other DNA
acatgagccagagaggggcg

SEQ ID NO: 428 - DNA, 20 bp, synthetic construct
  source 1..20: mol_type = other DNA
gaggcagcaagaacctttca

SEQ ID NO: 429 - DNA, 20 bp, synthetic construct
  source 1..20: mol_type = other DNA
tggcccacactcctggcggg

SEQ ID NO: 430 - DNA, 20 bp, synthetic construct
  source 1..20: mol_type = other DNA
cgttggcccacactcctggc

SEQ ID NO: 431 - DNA, 20 bp, synthetic construct
  source 1..20: mol_type = other DNA
tctccccaggtacaatggct

SEQ ID NO: 432 - DNA, 20 bp, synthetic construct
  source 1..20: mol_type = other DNA
cagttgttccaacctagcat

SEQ ID NO: 433 - DNA, 20 bp, synthetic construct
  source 1..20: mol_type = other DNA
ggccatgctgctggagacac

SEQ ID NO: 434 - DNA, 20 bp, synthetic construct
  source 1..20: mol_type = other DNA
tcacctgagcgggacacaga

SEQ ID NO: 435 - DNA, 20 bp, synthetic construct
  source 1..20: mol_type = other DNA
ttactgttccaccccaggaa

SEQ ID NO: 436 - DNA, 20 bp, synthetic construct
  source 1..20: mol_type = other DNA
tttaaacaggtataaaagtt

SEQ ID NO: 437 - DNA, 20 bp, synthetic construct
  source 1..20: mol_type = other DNA
gcttcagcgcactgagctga

SEQ ID NO: 438 - DNA, 20 bp, synthetic construct
  source 1..20: mol_type = other DNA
tgccaagcagatgtcaagag

SEQ ID NO: 439 - DNA, 20 bp, synthetic construct
  source 1..20: mol_type = other DNA
cttactatcatgatgagttt

SEQ ID NO: 440 - DNA, 20 bp, synthetic construct
  source 1..20: mol_type = other DNA
catatacctgagtagaaaat

SEQ ID NO: 441 - DNA, 20 bp, synthetic construct
  source 1..20: mol_type = other DNA
tcatatacctgagtagaaaa

SEQ ID NO: 442 - DNA, 20 bp, synthetic construct
  source 1..20: mol_type = other DNA
tgtttacagtttgaactaac

SEQ ID NO: 443 - DNA, 20 bp, synthetic construct
  source 1..20: mol_type = other DNA
tcattaggccttgtgaaaaa

SEQ ID NO: 444 - DNA, 20 bp, synthetic construct
  source 1..20: mol_type = other DNA
acacaggtattgcactgcac

SEQ ID NO: 445 - DNA, 20 bp, synthetic construct
  source 1..20: mol_type = other DNA
taacagaattaccgaattga

SEQ ID NO: 446 - DNA, 20 bp, synthetic construct
  source 1..20: mol_type = other DNA
aacagaattaccgaattgat

SEQ ID NO: 447 - DNA, 20 bp, synthetic construct
  source 1..20: mol_type = other DNA
tttcagaactacagttcctg

SEQ ID NO: 448 - DNA, 20 bp, synthetic construct
  source 1..20: mol_type = other DNA
agctcccaatgtcggagttt

SEQ ID NO: 449 - DNA, 20 bp, synthetic construct
  source 1..20: mol_type = other DNA
gagctcccaatgtcggagtt

SEQ ID NO: 450 - DNA, 20 bp, synthetic construct
  source 1..20: mol_type = other DNA
ttaaatgagctcccaatgtc

SEQ ID NO: 451 - DNA, 20 bp, synthetic construct
  source 1..20: mol_type = other DNA
tttaaatgagctcccaatgt

SEQ ID NO: 452 - DNA, 20 bp, synthetic construct
  source 1..20: mol_type = other DNA
accatacccattttctattc

SEQ ID NO: 453 - protein, 1837 aa, synthetic construct
MSSETGPVAVDPTLRRRIEPHEFEVFFDPRELRKETCLLYEINWGGRHSIWRHTSQNTNKHVEVNFIEKFTTERYFCPNTRCSITWFLSWSPCGECSRAITEFLSRYPHVTLFIYIARLYHHADPRNRQGLRDLISSGVTIQIMTEQESGYCWRNFVNYSPSNEAHWPRYPHLWVRLYVLELYCIILGLPPCLNILRRKQPQLTFFTIALQSCHYQRLPPHILWATGLKSGGSSGGSSGSETPGTSESATPESSGGSSGGSDKKYSIGLAIGTNSVGWAVITDEYKVPSKKFKVLGNTDRHSIKKNLIGALLFDSGETAEATRLKRTARRRYTRRKNRICYLQEIFSNEMAKVDDSFFHRLEESFLVEEDKKHERHPIFGNIVDEVAYHEKYPTIYHLRKKLVDSTDKADLRLIYLALAHMIKFRGHFLIEGDLNPDNSDVDKLFIQLVQTYNQLFEENPINASGVDAKAILSARLSKSRRLENLIAQLPGEKKNGLFGNLIALSLGLTPNFKSNFDLAEDAKLQLSKDTYDDDLDNLLAQIGDQYADLFLAAKNLSDAILLSDILRVNTEITKAPLSASMIKRYDEHHQDLTLLKALVRQQLPEKYKEIFFDQSKNGYAGYIDGGASQEEFYKFIKPILEKMDGTEELLVKLNREDLLRKQRTFDNGSIPHQIHLGELHAILRRQEDFYPFLKDNREKIEKILTFRIPYYVGPLARGNSRFAWMTRKSEETITPWNFEEVVDKGASAQSFIERMTNFDKNLPNEKVLPKHSLLYEYFTVYNELTKVKYVTEGMRKPAFLSGEQKKAIVDLLFKTNRKVTVKQLKEDYFKKIECFDSVEISGVEDRFNASLGTYHDLLKIIKDKDFLDNEENEDILEDIVLTLTLFEDREMIEERLKTYAHLFDDKVMKQLKRRRYTGWGRLSRKLINGIRDKQSGKTILDFLKSDGFANRNFMQLIHDDSLTFKEDIQKAQVSGQGDSLHEHIANLAGSPAIKKGILQTVKVVDELVKVMGRHKPENIVIEMARENQTTQKGQKNSRERMKRIEEGIKELGSQILKEHPVENTQLQNEKLYLYYLQNGRDMYVDQELDINRLSDYDVDHIVPQSFLKDDSIDNKVLTRSDKNRGKSDNVPSEEVVKKMKNYWRQLLNAKLITQRKFDNLTKAERGGLSELDKAGFIKRQLVETRQITKHVAQILDSRMNTKYDENDKLIREVKVITLKSKLVSDFRKDFQFYKVREINNYHHAHDAYLNAVVGTALIKKYPKLESEFVYGDYKVYDVRKMIAKSEQEIGKATAKYFFYSNIMNFFKTEITLANGEIRKRPLIETNGETGEIVWDKGRDFATVRKVLSMPQVNIVKKTEVQTGGFSKESILPKRNSDKLIARKKDWDPKKYGGFDSPTVAYSVLVVAKVEKGKSKKLKSVKELLGITIMERSSFEKNPIDFLEAKGYKEVKKDLIIKLPKYSLFELENGRKRMLASAGELQKGNELALPSKYVNFLYLASHYEKLKGSPEDNEQKQLFVEQHKHYLDEIIEQISEFSKRVILADANLDKVLSAYNKHRDKPIREQAENIIHLFTLTNLGAPAAFKYFDTTIDRKRYTSTKEVLDATLIHQSITGLYETRIDLSQLGGDSGGSGGSGGSTNLSDIIEKETGKQLVIQESILMLPEEVEEVIGNKPESDILVHTAYDESTDENVMLLTSDAPEYKPWALVIQDSNGENKIKMLSGGSGGSGGSTNLSDIIEKETGKQLVIQESILMLPEEVEEVIGNKPESDILVHTAYDESTDENVMLLTSDAPEYKPWALVIQDSNGENKIKMLSGGSKRTADGSEFESPKKKRKVE

SEQ ID NO: 454 - protein, 485 aa, synthetic construct
MALPVTALLLPLALLLHAARPQILLTQSPVILSVSPGERVSFSCRASQSIGTNIHWYQQRTNGSPRLLIKYASESISGIPSRFSGSGSGTDFTLSINSVESEDIADYYCQQNNNWPTTFGAGTKLELKGGGGSGGGGSGGGGSQVQLKQSGPGLVQPSQSLSITCTVSGFSLTNYGVHWVRQSPGKGLEWLGVIWSGGNTDYNTPFTSRLSINKDNSKSQVFFKMNSLQSQDTAIYYCARALTYYDYEFAYWGQGTLVTVSSTTTPAPRPPTPAPTIASQPLSLRPEACRPAAGGAVHTRGLDFACDIYIWAPLAGTCGVLLLSLVITLYCKRGRKKLLYIFKQPFMRPVQTTQEEDGCSCRFPEEEEGGCELRVKFSRSADAPAYQQGQNQLYNELNLGRREEYDVLDKRRGRDPEMGGKPRRKNPQEGLYNELQKDKMAEAYSEIGMKGERRRGKGHDGLYQGLSTATKDTYDALHMQALPPR

SEQ ID NO: 455 - DNA, 1458 bp, synthetic construct
  source 1..1458: mol_type = other DNA
atggcactgccagtgacagctctcctgttgccactcgcccttctgctgcatgctgcaaggcctcaaatcctgctcactcagagcccggtgattttgtccgtctcccccggcgagcgcgtatcattttcatgtagggcttctcagagcatcggcaccaatattcactggtatcagcagcgcacaaatggcagcccaagactgctcattaagtatgcctcagaatcaatttcaggcatcccaagccgcttctccggctcaggctccgggaccgactttacattgagcattaactcagtggaatctgaagacatcgccgattactactgtcaacagaataataactggccgacgacgtttggcgccggaactaaactggaactgaaggggggagggggctctggaggtggagggtccggaggaggcgggtcacaagtgcagctgaagcaatctggacctggactcgttcagccttctcagagcctctccatcacttgcactgtaagtggcttctcactgaccaactatggggtgcactgggtgagacagtcccccggaaaggggctggaatggctcggagttatttggagcggaggaaatacggactacaacaccccgtttacatccagactctccataaataaggataacagcaaaagccaggtgttttttaaaatgaacagcctgcagagccaagatacagctatctattattgtgcgcgcgcactgacatactatgactacgagtttgcatactggggccaagggacccttgtcacagtctcatcaaccacaacacctgctccaaggccccccacacccgctccaactatagccagccaaccattgagcctcagacctgaagcttgcaggcccgcagcaggaggcgccgtccatacgcgaggcctggacttcgcgtgtgatatttatatttgggcccctttggccggaacatgtggggtgttgcttctctcccttgtgatcactctgtattgtaagcgcgggagaaagaagctcctgtacatcttcaagcagccttttatgcgacctgtgcaaaccactcaggaagaagatgggtgttcatgccgcttccccgaggaggaagaaggagggtgtgaactgagggtgaaattttctagaagcgccgatgctcccgcatatcagcagggtcagaatcagctctacaatgaattgaatctcggcaggcgagaagagtacgatgttctggacaagagacggggcagggatcccgagatggggggaaagccccggagaaaaaatcctcaggaggggttgtacaatgagctgcagaaggacaagatggctgaagcctatagcgagatcggaatgaaaggcgaaagacgcagaggcaaggggcatgacggtctgtaccagggtctctctacagccaccaaggacacttatgatgcgttgcatatgcaagccttgccaccccgctaa

SEQ ID NO: 456 - DNA, 7326 bp, synthetic construct
  source 1..7326: mol_type = other DNA
tcgcgcgtttcggtgatgacggtgaaaacctctgacacatgcagctcccggagacggtcacagcttgtctgtaagcggatgccgggagcagacaagcccgtcagggcgcgtcagcgggtgttggcgggtgtcggggctggcttaactatgcggcatcagagcagattgtactgagagtgcaccatcatatgccagcctatggtgacattgattattgactagttattaatagtaatcaattacggggtcattagttcatagcccatatatggagttccgcgttacataacttacggtaaatggcccgcctggctgaccgcccaacgacccccgcccattgacgtcaataatgacgtatgttcccatagtaacgccaatagggactttccattgacgtcaatgggtggagtatttacggtaaactgcccacttggcagtacatcaagtgtatcatatgccaagtacgccccctattgacgtcaatgacggtaaatggcccgcctggcattatgcccagtacatgaccttatgggactttcctacttggcagtacatctacgtattagtcatcgctattaccatggtgatgcggttttggcagtacatcaatgggcgtggatagcggtttgactcacggggatttccaagtctccaccccattgacgtcaatgggagtttgttttggcaccaaaatcaacgggactttccaaaatgtcgtaacaactccgccccattgacgcaaatgggcggtaggcgtgtacggtgggaggtctatataagcagagctcgtttagtgaaccgggtctctctggttagaccagatctgagcctgggagctctctggctaactagggaacccactgcttaagcctcaataaagcttgccttgagtgctcaaagtagtgtgtgcccgtctgttgtgtgactctggtaactagagatccctcagacccttttagtcagtgtggaaaatctctagcagtggcgcccgaacagggacttgaaagcgaaagtaaagccagaggagatctctcgacgcaggactcggcttgctgaagcgcgcacggcaagaggcgaggggcggcgactggtgagtacgccaaaaattttgactagcggaggctagaaggagagagtagggtgcgagagcgtcggtattaagcgggggagaattagataaatgggaaaaaattcggttaaggccagggggaaagaaacaatataaactaaaacatatagttagggcaagcagggagctagaacgattcgcagttaatcctggccttttagagacatcagaaggctgtagacaaatactgggacagctacaaccatcccttcagacaggatcagaagaacttagatcattatataatacaatagcagtcctctattgtgtgcatcaaaggatagatgtaaaagacaccaaggaagccttagataagatagaggaagagcaaaacaaaagtaagaaaaaggcacagcaagcagcagctgacacaggaaacaacagccaggtcagccaaaattaccctatagtgcagaacctccaggggcaaatggtacatcaggccatatcacctagaactttaaattaagacagcagtacaaatggcagtattcatccacaattttaaaagaaaaggggggattggggggtacagtgcaggggaaagaatagtagacataatagcaacagacatacaaactaaagaattacaaaaacaaattacaaaaattcaaaattttcgggtttattacagggacagcagagatccagtttggaaaggaccagcaaagctcctctggaaaggtgaaggggcagtagtaatacaagataatagtgacataaaagtagtgccaagaagaaaagcaaagatcatcagggattatggaaaacagatggcaggtgatgattgtgtggcaagtagacaggatgaggattaacacatggaaaagattagtaaaacaccatagctctagagcgatcccgatcttcagacctggaggaggagatatgagggacaattggagaagtgaattatataaatataaagtagtaaaaattgaaccattaggagtagcacccaccaaggcaaagagaagagtggtgcagagagaaaaaagagcagtgggaataggagctttgttccttgggttcttgggagcagcaggaagcactatgggcgcagcgtcaatgacgctgacggtacaggccagacaattattgtctggtatagtgcagcagcagaacaatttgctgagggctattgaggcgcaacagcatctgttgcaactcacagtctggggcatcaagcagctccaggcaagaatcctggctgtggaaagatacctaaaggatcaacagctcctggggatttggggttgctctggaaaactcatttgcaccactgctgtgccttggaatgctagttggagtaataaatctctggaacagatttggaatcacacgacctggatggagtgggacagagaaattaacaattacacaagcttggtaggtttaagaatagtttttgctgtactttctatagtgaatagagttaggcagggatattcaccattatcgtttcagacccacctcccaaccccgaggggacccgacaggcccgaaggaatagaagaagaaggtggagagagagacagagacagatccattcgattagtgaacggatccatctcgacggaatgaaagaccccacctgtaggtttggcaagctaggatcaaggttaggaacagagagacagcagaatatgggccaaacaggatatctgtggtaagcagttcctgccccggctcagggccaagaacagttggaacagcagaatatgggccaaacaggatatctgtggtaagcagttcctgccccggctcagggccaagaacagatggtccccagatgcggtcccgccctcagcagtttctagagaaccatcagatgtttccagggtgccccaaggacctgaaatgaccctgtgccttatttgaactaaccaatcagttcgcttctcgcttctgttcgcgcgcttctgctccccgagctcaataaaagagcccacaacccctcactcggcgcgattcacctgacgcgtctacgccaccatggcactgccagtgacagctctcctgttgccactcgcccttctgctgcatgctgcaaggcctcaaatcctgctcactcagagcccggtgattttgtccgtctcccccggcgagcgcgtatcattttcatgtagggcttctcagagcatcggcaccaatattcactggtatcagcagcgcacaaatggcagcccaagactgctcattaagtatgcctcagaatcaatttcaggcatcccaagccgcttctccggctcaggctccgggaccgactttacattgagcattaactcagtggaatctgaagacatcgccgattactactgtcaacagaataataactggccgacgacgtttggcgccggaactaaactggaactgaaggggggagggggctctggaggtggagggtccggaggaggcgggtcacaagtgcagctgaagcaatctggacctggactcgttcagccttctcagagcctctccatcacttgcactgtaagtggcttctcactgaccaactatggggtgcactgggtgagacagtcccccggaaaggggctggaatggctcggagttatttggagcggaggaaatacggactacaacaccccgtttacatccagactctccataaataaggataacagcaaaagccaggtgttttttaaaatgaacagcctgcagagccaagatacagctatctattattgtgcgcgcgcactgacatactatgactacgagtttgcatactggggccaagggacccttgtcacagtctcatcaaccacaacacctgctccaaggccccccacacccgctccaactatagccagccaaccattgagcctcagacctgaagcttgcaggcccgcagcaggaggcgccgtccatacgcgaggcctggacttcgcgtgtgatatttatatttgggcccctttggccggaacatgtggggtgttgcttctctcccttgtgatcactctgtattgtaagcgcgggagaaagaagctcctgtacatcttcaagcagccttttatgcgacctgtgcaaaccactcaggaagaagatgggtgttcatgccgcttccccgaggaggaagaaggagggtgtgaactgagggtgaaattttctagaagcgccgatgctcccgcatatcagcagggtcagaatcagctctacaatgaattgaatctcggcaggcgagaagagtacgatgttctggacaagagacggggcagggatcccgagatggggggaaagccccggagaaaaaatcctcaggaggggttgtacaatgagctgcagaaggacaagatggctgaagcctatagcgagatcggaatgaaaggcgaaagacgcagaggcaaggggcatgacggtctgtaccagggtctctctacagccaccaaggacacttatgatgcgttgcatatgcaagccttgccaccccgctaatgacaggtacctttaagaccaatgacttacaaggcagctgtagatcttagccactttttaaaagaaaaggggggactggaagggctaattcactcccaaagaagacaagatctgctttttgcctgtactgggtctctctggttagaccagatctgagcctgggagctctctggctaactagggaacccactgcttaagcctcaataaagcttgccttgagtgcttcaatgtgtgtgttggttttttgtgtgtcgaaattctagcgattctagcttggcgtaatcatggtcatagctgtttcctgtgtgaaattgttatccgctcacaattccacacaacatacgagccggaagcataaagtgtaaagcctggggtgcctaatgagtgagctaactcacattaattgcgttgcgctcactgcccgctttccagtcgggaaacctgtcgtgccagctgcattaatgaatcggccaacgcgcggggagaggcggtttgcgtattgggcgctcttccgcttcctcgctcactgactcgctgcgctcggtcgttcggctgcggcgagcggtatcagctcactcaaaggcggtaatacggttatccacagaatcaggggataacgcaggaaagaacatgtgagcaaaaggccagcaaaaggccaggaaccgtaaaaaggccgcgttgctggcgtttttccataggctccgcccccctgacgagcatcacaaaaatcgacgctcaagtcagaggtggcgaaacccgacaggactataaagataccaggcgtttccccctggaagctccctcgtgcgctctcctgttccgaccctgccgcttaccggatacctgtccgcctttctcccttcgggaagcgtggcgctttctcatagctcacgctgtaggtatctcagttcggtgtaggtcgttcgctccaagctgggctgtgtgcacgaaccccccgttcagcccgaccgctgcgccttatccggtaactatcgtcttgagtccaacccggtaagacacgacttatcgccactggcagcagccactggtaacaggattagcagagcgaggtatgtaggcggtgctacagagttcttgaagtggtggcctaactacggctacactagaagaacagtatttggtatctgcgctctgctgaagccagttaccttcggaaaaagagttggtagctcttgatccggcaaacaaaccaccgctggtagcggtggtttttttgtttgcaagcagcagattacgcgcagaaaaaaaggatctcaagaagatcctttgatcttttctacggggtctgacgctcagtggaacgaaaactcacgttaagggattttggtcatgagattatcaaaaaggatcttcacctagatccttttaaattaaaaatgaagttttaaatcaatctaaagtatatatgagtaaacttggtctgacagttaccaatgcttaatcagtgaggcacctatctcagcgatctgtctatttcgttcatccatagttgcctgactccccgtcgtgtagataactacgatacgggagggcttaccatctggccccagtgctgcaatgataccgcgagacccacgctcaccggctccagatttatcagcaataaaccagccagccggaagggccgagcgcagaagtggtcctgcaactttatccgcctccatccagtctattaattgttgccgggaagctagagtaagtagttcgccagttaatagtttgcgcaacgttgttgccattgctacaggcatcgtggtgtcacgctcgtcgtttggtatggcttcattcagctccggttcccaacgatcaaggcgagttacatgatcccccatgttgtgcaaaaaagcggttagctccttcggtcctccgatcgttgtcagaagtaagttggccgcagtgttatcactcatggttatggcagcactgcataattctcttactgtcatgccatccgtaagatgcttttctgtgactggtgagtactcaaccaagtcattctgagaatagtgtatgcggcgaccgagttgctcttgcccggcgtcaatacgggataataccgcgccacatagcagaactttaaaagtgctcatcattggaaaacgttcttcggggcgaaaactctcaaggatcttaccgctgttgagatccagttcgatgtaacccactcgtgcacccaactgatcttcagcatcttttactttcaccagcgtttctgggtgagcaaaaacaggaaggcaaaatgccgcaaaaaagggaataagggcgacacggaaatgttgaatactcatactcttcctttttcaatattattgaagcatttatcagggttattgtctcatgagcggatacatatttgaatgtatttagaaaaataaacaaataggggttccgcgcacatttccccgaaaagtgccacctgggactagctttttgcaaaagcctaggcctccaaaaaagcctcctcactacttctggaatagctcagaggccgaggcggcctcggcctctgcataaataaaaaaaattagtcagccatggggcggagaatgggcggaactgggcggagttaggggcgggatgggcggagttaggggcgggactatggttgctgactaattgagatgagcttgcatgccgacattgattattgactagtccctaagaaaccattcttatcatgacattaacctataaaaataggcgtatcacgaggccctttcgtc

SEQ ID NO: 457 - protein, 1091 aa, Homo sapiens
MRPSGTAGAALLALLAALCPASRALEEKKVCQGTSNKLTQLGTFEDHFLSLQRMFNNCEVVLGNLEITYVQRNYDLSFLKTIQEVAGYVLIALNTVERIPLENLQIIRGNMYYENSYALAVLSNYDANKTGLKELPMRNLQGQKCDPSCPNGSCWGAGEENCQKLTKIICAQQCSGRCRGKSPSDCCHNQCAAGCTGPRESDCLVCRKFRDEATCKDTCPPLMLYNPTTYQMDVNPEGKYSFGATCVKKCPRNYVVTDHGSCVRACGADSYEMEEDGVRKCKKCEGPCRKVCNGIGIGEFKDSLSINATNIKHFKNCTSISGDLHILPVAFRGDSFTHTPPLDPQELDILKTVKEITGFLLIQAWPENRTDLHAFENLEIIRGRTKQHGQFSLAVVSLNITSLGLRSLKEISDGDVIISGNKNLCYANTINWKKLFGTSGQKTKIISNRGENSCKATGQVCHALCSPEGCWGPEPRDCVSCRNVSRGRECVDKCNLLEGEPREFVENSECIQCHPECLPQAMNITCTGRGPDNCIQCAHYIDGPHCVKTCPAGVMGENNTLVWKYADAGHVCHLCHPNCTYGCTGPGLEGCPTNGPKIPSIATGMVGALLLLLVVALGIGLFMRRRHIVRKRTLRRLLQERELVEPLTPSGEAPNQALLRILKETEFKKIKVLGSGAFGTVYKGLWIPEGEKVKIPVAIKELREATSPKANKEILDEAYVMASVDNPHVCRLLGICLTSTVQLITQLMPFGCLLDYVREHKDNIGSQYLLNWCVQIAKGMNYLEDRRLVHRDLAARNVLVKTPQHVKITDFGLAKLLGAEEKEYHAEGGKVPIKWMALESILHRIYTHQSDVWSYGVTVWELMTFGSKPYDGIPASEISSILEKGERLPQPPICTIDVYMIMVKCWMIDADSRPKFRELIIEFSKMARDPQRYLVIQGDERMHLPSPTDSNFYRALMDEEDMDDVVDADEYLIPQQGFFSSPSTSRTPLLSSLSATSNNSTVACIDRNGLQSCPIKEDSFLQRYSSDPTGALTEDSIDDTFLPVPGEWLVWKQSCSSTSSTHSAAASLQCPSQVLPPASPEGETVADLQTQ

SEQ ID NO: 458 - DNA, 3859 bp, Homo sapiens
  source 1..3859: mol_type = genomic DNA
gtccgggcagcccccggcgcagcgcggccgcagcagcctcctccccccgcacggtgtgagcgcccgccgcggccgaggcggccggagtcccgagctagccccggcggccgccgccgcccagaccggacgacaggccacctcgtcggcgtccgcccgagtccccgcctcgccgccaacgccacaaccaccgcgcacggccccctgactccgtccagtattgatcgggagagccggagcgagctcttcggggagcagcgatgcgaccctccgggacggccggggcagcgctcctggcgctgctggctgcgctctgcccggcgagtcgggctctggaggaaaagaaagtttgccaaggcacgagtaacaagctcacgcagttgggcacttttgaagatcattttctcagcctccagaggatgttcaataactgtgaggtggtccttgggaatttggaaattacctatgtgcagaggaattatgatctttccttcttaaagaccatccaggaggtggctggttatgtcctcattgccctcaacacagtggagcgaattcctttggaaaacctgcagatcatcagaggaaatatgtactacgaaaattcctatgccttagcagtcttatctaactatgatgcaaataaaaccggactgaaggagctgcccatgagaaatttacagggacaaaagtgtgatccaagctgtcccaatgggagctgctggggtgcaggagaggagaactgccagaaactgaccaaaatcatctgtgcccagcagtgctccgggcgctgccgtggcaagtcccccagtgactgctgccacaaccagtgtgctgcaggctgcacaggcccccgggagagcgactgcctggtctgccgcaaattccgagacgaagccacgtgcaaggacacctgccccccactcatgctctacaaccccaccacgtaccagatggatgtgaaccccgagggcaaatacagctttggtgccacctgcgtgaagaagtgtccccgtaattatgtggtgacagatcacggctcgtgcgtccgagcctgtggggccgacagctatgagatggaggaagacggcgtccgcaagtgtaagaagtgcgaagggccttgccgcaaagtgtgtaacggaataggtattggtgaatttaaagactcactctccataaatgctacgaatattaaacacttcaaaaactgcacctccatcagtggcgatctccacatcctgccggtggcatttaggggtgactccttcacacatactcctcctctggatccacaggaactggatattctgaaaaccgtaaaggaaatcacagggtttttgctgattcaggcttggcctgaaaacaggacggacctccatgcctttgagaacctagaaatcatacgcggcaggaccaagcaacatggtcagttttctcttgcagtcgtcagcctgaacataacatccttgggattacgctccctcaaggagataagtgatggagatgtgataatttcaggaaacaaaaatttgtgctatgcaaatacaataaactggaaaaaactgtttgggacctccggtcagaaaaccaaaattataagcaacagaggtgaaaacagctgcaaggccacaggccaggtctgccatgccttgtgctcccccgagggctgctggggcccggagcccagggactgcgtctcttgccggaatgtcagccgaggcagggaatgcgtggacaagtgcaaccttctggagggtgagccaagggagtttgtggagaactctgagtgcatacagtgccacccagagtgcctgcctcaggccatgaacatcacctgcacaggacggggaccagacaactgtatccagtgtgcccactacattgacggcccccactgcgtcaagacctgcccggcaggagtcatgggagaaaacaacaccctggtctggaagtacgcagacgccggccatgtgtgccacctgtgccatccaaactgcacctacggatgcactgggccaggtcttgaaggctgtccaacgaatgggcctaagatcccgtccatcgccactgggatggtgggggccctcctcttgctgctggtggtggccctggggatcggcctcttcatgcgaaggcgccacatcgttcggaagcgcacgctgcggaggctgctgcaggagagggagcttgtggagcctcttacacccagtggagaagctcccaaccaagctctcttgaggatcttgaaggaaactgaattcaaaaagatcaaagtgctgggctccggtgcgttcggcacggtgtataagggactctggatcccagaaggtgagaaagttaaaattcccgtcgctatcaaggaattaagagaagcaacatctccgaaagccaacaaggaaatcctcgatgaagcctacgtgatggccagcgtggacaacccccacgtgtgccgcctgctgggcatctgcctcacctccaccgtgcagctcatcacgcagctcatgcccttcggctgcctcctggactatgtccgggaacacaaagacaatattggctcccagtacctgctcaactggtgtgtgcagatcgcaaagggcatgaactacttggaggaccgtcgcttggtgcaccgcgacctggcagccaggaacgtactggtgaaaacaccgcagcatgtcaagatcacagattttgggctggccaaactgctgggtgcggaagagaaagaataccatgcagaaggaggcaaagtgcctatcaagtggatggcattggaatcaattttacacagaatctatacccaccagagtgatgtctggagctacggggtgaccgtttgggagttgatgacctttggatccaagccatatgacggaatccctgccagcgagatctcctccatcctggagaaaggagaacgcctccctcagccacccatatgtaccatcgatgtctacatgatcatggtcaagtgctggatgatagacgcagatagtcgcccaaagttccgtgagttgatcatcgaattctccaaaatggcccgagacccccagcgctaccttgtcattcagggggatgaaagaatgcatttgccaagtcctacagactccaacttctaccgtgccctgatggatgaagaagacatggacgacgtggtggatgccgacgagtacctcatcccacagcagggcttcttcagcagcccctccacgtcacggactcccctcctgagctctctgagtgcaaccagcaacaattccaccgtggcttgcattgatagaaatgggctgcaaagctgtcccatcaaggaagacagcttcttgcagcgatacagctcagaccccacaggcgccttgactgaggacagcatagacgacaccttcctcccagtgcctggtgagtggcttgtctggaaacagtcctgctcctcaacctcctcgacccactcagcagcagccagtctccagtgtccaagccaggtgctccctccagcatctccagagggggaaacagtggcagatttgcagacacagtgaagggcgtaaggagcagataaacacatgaccgagcctgcacaagctctttgttgtgtctggttgtttgctgtacctctgttgtaagaatgaatctgcaaaatttctagcttatgaagcaaatcacggacatacacatctgtatgtgtgagtgttcatgatgtgtgtacatctgtgtatgtgtgtgtgtgtatgtgtgtgtttgtgacagatttgatccctgttctctctgctggctctatcttgacctgtgaaacgtatatttaactaattaaatattagttaatattaataaattttaagctttatccagaaaaaaaaaaaaaaaa

SEQ ID NO: 459 - DNA, 306 bp, synthetic construct
  misc_feature 1..306: note = Description of artificial sequence: DnaE Intein-N polynucleotidesequence
  source 1..306: mol_type = other DNA
tgcctgtcatacgaaaccgagatactgacagtagaatatggccttctgccaatcgggaagattgtggagaaacggatagaatgcacagtttactctgtcgataacaatggtaacatttatactcagccagttgcccagtggcacgaccggggagagcaggaagtattcgaatactgtctggaggatggaagtctcattagggccactaaggaccacaaatttatgacagtcgatggccagatgctgcctatagacgaaatctttgagcgagagttggacctcatgcgagttgacaaccttcctaat

SEQ ID NO: 460 - protein, 102 aa, synthetic construct
  REGION 1..102: note = Description of artificial sequence: DnaE Intein-N polypeptidesequence
CLSYETEILTVEYGLLPIGKIVEKRIECTVYSVDNNGNIYTQPVAQWHDRGEQEVFEYCLEDGSLIRATKDHKFMTVDGQMLPIDEIFERELDLMRVDNLPN

SEQ ID NO: 461 - DNA, 108 bp, synthetic construct
  misc_feature 1..108: note = Description of artificial sequence: DnaE Intein-C polynucleotidesequence
  source 1..108: mol_type = other DNA
atgatcaagatagctacaaggaagtatcttggcaaacaaaacgtttatgatattggagtcgaaagagatcacaactttgctctgaagaacggattcatagcttctaat

SEQ ID NO: 462 - protein, 36 aa, synthetic construct
  REGION 1..36: note = Description of artificial sequence: DnaE Intein-C polypeptidesequence
MIKIATRKYLGKQNVYDIGVERDHNFALKNGFIASN

SEQ ID NO: 463 - DNA, 303 bp, synthetic construct
  misc_feature 1..303: note = Description of artificial sequence: Cfa-N polynucleotide sequence
  source 1..303: mol_type = other DNA
tgcctgtcttatgataccgagatacttaccgttgaatatggcttcttgcctattggaaagattgtcgaagagagaattgaatgcacagtatatactgtagacaagaatggtttcgtttacacacagcccattgctcaatggcacaatcgcggcgaacaagaagtatttgagtactgtctcgaggatggaagcatcatacgagcaactaaagatcataaattcatgaccactgacgggcagatgttgccaatagatgagatattcgagcggggcttggatctcaaacaagtggatggattgcca

SEQ ID NO: 464 - protein, 101 aa, synthetic construct
  REGION 1..101: note = Description of artificial sequence: Cfa-N polypeptide sequence
CLSYDTEILTVEYGFLPIGKIVEERIECTVYTVDKNGFVYTQPIAQWHNRGEQEVFEYCLEDGSIIRATKDHKFMTTDGQMLPIDEIFERGLDLKQVDGLP

SEQ ID NO: 465 - DNA, 159 bp, synthetic construct
  misc_feature 1..159: note = Description of artificial sequence: Cfa-C polynucleotide sequence
  source 1..159: mol_type = other DNA
atgaagaggactgccgatggatcagagtttgaatctcccaagaagaagaggaaagtaaagataatatctcgaaaaagtcttggtacccaaaatgtctatgatattggagtggagaaagatcacaacttccttctcaagaacggtctcgtagccagcaac

SEQ ID NO: 466 - protein, 53 aa, synthetic construct
  REGION 1..53: note = Description of artificial sequence: Cfa-C polypeptide sequence
MKRTADGSEFESPKKKRKVKIISRKSLGTQNVYDIGVEKDHNFLLKNGLVASN

SEQ ID NO: 467 - protein, 119 aa, Homo sapiens
MSRSVALAVLALLSLSGLEAIQRTPKIQVYSRHPAENGKSNFLNCYVSGFHPSDIEVDLLKNGERIEKVEHSDLSFSKDWSFYLLYYTEFTPTEKDEYACRVNHVTLSQPKIVKWDRDM

SEQ ID NO: 468 - DNA, 9199 bp, Homo sapiens
  source 1..9199: mol_type = genomic DNA
catgtcataaatggtaagtccaagaaaaatacaggtattcccccccaaagaaaactgtaaaatcgacttttttctatctgtactgttttttattggtttttaaattggttttccaagtgagtaaatcagaatctatctgtaatggattttaaatttagtgtttctctgtgatgtagtaaacaagaaactagaggcaaaaatagccctgtcccttgctaaacttctaaggcacttttctagtacaactcaacactaacatttcaggcctttagtgccttatatgagtttttaaaagggggaaaagggagggagcaagagtgtcttaactcatacatttaggcataacaattattctcatattttagttattgagagggctggtagaaaaactaggtaaataatattaataattatagcgcttattaaacactacagaacacttactatgtaccaggcattgtgggaggctctctcttgtgcattatctcatttcattaggtccatggagagtattgcattttcttagtttaggcatggcctccacaataaagattatcaaaagcctaaaaatatgtaaaagaaacctagaagttatttgttgtgctccttggggaagctaggcaaatcctttcaactgaaaaccatggtgacttccaagatctctgcccctccccatcgccatggtccacttcctcttctcactgttcctcttagaaaagatctgtggactccaccaccacgaaatggcggcaccttatttatggtcactttagagggtaggttttcttaatgggtctgcctgtcatgtttaacgtccttggctgggtccaaggcagatgcagtccaaactctcactaaaattgccgagccctttgtcttccagtgtctaaaatattaatgtcaatggaatcaggccagagtttgaattctagtctcttagcctttgtttcccctgtccataaaatgaatgggggtaattctttcctcctacagtttatttatatattcactaattcattcattcatccatccattcgttcattcggtttactgagtacctactatgtgccagcccctgttctagggtggaaactaagagaatgatgtacctagagggcgctggaagctctaaagccctagcagttactgcttttactattagtggtcgtttttttctcccccccgccccccgacaaatcaacagaacaaagaaaattacctaaacagcaaggacatagggaggaacttcttggcacagaactttccaaacactttttcctgaagggatacaagaagcaagaaaggtactctttcactaggaccttctctgagctgtcctcaggatgcttttgggactatttttcttacccagagaatggagaaaccctgcagggaattcccaagctgtagttataaacagaagttctccttctgctaggtagcattcaaagatcttaatcttctgggtttccgttttctcgaatgaaaaatgcaggtccgagcagttaactggctggggcaccattagcaagtcacttagcatctctggggccagtctgcaaagcgagggggcagccttaatgtgcctccagcctgaagtcctagaatgagcgcccggtgtcccaagctggggcgcgcaccccagatcggagggcgccgatgtacagacagcaaactcacccagtctagtgcatgccttcttaaacatcacgagactctaagaaaaggaaactgaaaacgggaaagtccctctctctaacctggcactgcgtcgctggcttggagacaggtgacggtccctgcgggccttgtcctgattggctgggcacgcgtttaatataagtggaggcgtcgcgctggcgggcattcctgaagctgacagcattcgggccgagatgtctcgctccgtggccttagctgtgctcgcgctactctctctttctggcctggaggctatccagcgtgagtctctcctaccctcccgctctggtccttcctctcccgctctgcaccctctgtggccctcgctgtgctctctcgctccgtgacttcccttctccaagttctccttggtggcccgccgtggggctagtccagggctggatctcggggaagcggcggggtggcctgggagtggggaagggggtgcgcacccgggacgcgcgctacttgcccctttcggcggggagcaggggagacctttggcctacggcgacgggagggtcgggacaaagtttagggcgtcgataagcgtcagagcgccgaggttgggggagggtttctcttccgctctttcgcggggcctctggctcccccagcgcagctggagtgggggacgggtaggctcgtcccaaaggcgcggcgctgaggtttgtgaacgcgtggaggggcgcttggggtctgggggaggcgtcgcccgggtaagcctgtctgctgcggctctgcttcccttagactggagagctgtggacttcgtctaggcgcccgctaagttcgcatgtcctagcacctctgggtctatgtggggccacaccgtggggaggaaacagcacgcgacgtttgtagaatgcttggctgtgatacaaagcggtttcgaataattaacttatttgttcccatcacatgtcacttttaaaaaattataagaactacccgttattgacatctttctgtgtgccaaggactttatgtgctttgcgtcatttaattttgaaaacagttatcttccgccatagataactactatggttatcttctgcctctcacagatgaagaaactaaggcaccgagattttaagaaacttaattacacaggggataaatggcagcaatcgagattgaagtcaagcctaaccagggcttttgcgggagcgcatgccttttggctgtaattcgtgcatttttttttaagaaaaacgcctgccttctgcgtgagattctccagagcaaactgggcggcatgggccctgtggtcttttcgtacagagggcttcctctttggctctttgcctggttgtttccaagatgtactgtgcctcttactttcggttttgaaaacatgagggggttgggcgtggtagcttacgcctgtaatcccagcacttagggaggccgaggcgggaggatggcttgaggtccgtagttgagaccagcctggccaacatggtgaagcctggtctctacaaaaaataataacaaaaattagccgggtgtggtggctcgtgcctgtggtcccagctgctccggtggctgaggcgggaggatctcttgagcttaggcttttgagctatcatggcgccagtgcactccagcgtgggcaacagagcgagaccctgtctctcaaaaaagaaaaaaaaaaaaaaagaaagagaaaagaaaagaaagaaagaagtgaaggtttgtcagtcaggggagctgtaaaaccattaataaagataatccaagatggttaccaagactgttgaggacgccagagatcttgagcactttctaagtacctggcaatacactaagcgcgctcaccttttcctctggcaaaacatgatcgaaagcagaatgttttgatcatgagaaaattgcatttaatttgaatacaatttatttacaacataaaggataatgtatatatcaccaccattactggtatttgctggttatgttagatgtcattttaaaaaataacaatctgatatttaaaaaaaaatcttattttgaaaatttccaaagtaatacatgccatgcatagaccatttctggaagataccacaagaaacatgtaatgatgattgcctctgaaggtctattttcctcctctgacctgtgtgtgggttttgtttttgttttactgtgggcataaattaatttttcagttaagttttggaagcttaaataactctccaaaagtcataaagccagtaactggttgagcccaaattcaaacccagcctgtctgatacttgtcctcttcttagaaaagattacagtgatgctctcacaaaatcttgccgccttccctcaaacagagagttccaggcaggatgaatctgtgctctgatccctgaggcatttaatatgttcttattattagaagctcagatgcaaagagctctcttagcttttaatgttatgaaaaaaatcaggtcttcattagattccccaatccacctcttgatggggctagtagcctttccttaatgatagggtgtttctagagagatatatctggtcaaggtggcctggtactcctccttctccccacagcctcccagacaaggaggagtagctgccttttagtgatcatgtaccctgaatataagtgtatttaaaagaattttatacacatatatttagtgtcaatctgtatatttagtagcactaacacttctcttcattttcaatgaaaaatatagagtttataatattttcttcccacttccccatggatggtctagtcatgcctctcattttggaaagtactgtttctgaaacattaggcaatatattcccaacctggctagtttacagcaatcacctgtggatgctaattaaaacgcaaatcccactgtcacatgcattactccatttgatcataatggaaagtatgttctgtcccatttgccatagtcctcacctatccctgttgtattttatcgggtccaactcaaccatttaaggtatttgccagctcttgtatgcatttaggttttgtttctttgttttttagctcatgaaattaggtacaaagtcagagaggggtctggcatataaaacctcagcagaaataaagaggttttgttgtttggtaagaacataccttgggttggttgggcacggtggctcgtgcctgtaatcccaacactttgggaggccaaggcaggctgatcacttgaagttgggagttcaagaccagcctggccaacatggtgaaatcccgtctctactgaaaatacaaaaattaaccaggcatggtggtgtgtgcctgtagtcccaggaatcacttgaacccaggaggcggaggttgcagtgagctgagatctcaccactgcacactgcactccagcctgggcaatggaatgagattccatcccaaaaaataaaaaaataaaaaaataaagaacataccttgggttgatccacttaggaacctcagataataacatctgccacgtatagagcaattgctatgtcccaggcactctactagacacttcatacagtttagaaaatcagatgggtgtagatcaaggcaggagcaggaaccaaaaagaaaggcataaacataagaaaaaaaatggaaggggtggaaacagagtacaataacatgagtaatttgatgggggctattatgaactgagaaatgaactttgaaaagtatcttggggccaaatcatgtagactcttgagtgatgtgttaaggaatgctatgagtgctgagagggcatcagaagtccttgagagcctccagagaaaggctcttaaaaatgcagcgcaatctccagtgacagaagatactgctagaaatctgctagaaaaaaaacaaaaaaggcatgtatagaggaattatgagggaaagataccaagtcacggtttattcttcaaaatggaggtggcttgttgggaaggtggaagctcatttggccagagtggaaatggaattgggagaaatcgatgaccaaatgtaaacacttggtgcctgatatagcttgacaccaagttagccccaagtgaaataccctggcaatattaatgtgtcttttcccgatattcctcaggtactccaaagattcaggtttactcacgtcatccagcagagaatggaaagtcaaatttcctgaattgctatgtgtctgggtttcatccatccgacattgaagttgacttactgaagaatggagagagaattgaaaaagtggagcattcagacttgtctttcagcaaggactggtctttctatctcttgtactacactgaattcacccccactgaaaaagatgagtatgcctgccgtgtgaaccatgtgactttgtcacagcccaagatagttaagtggggtaagtcttacattcttttgtaagctgctgaaagttgtgtatgagtagtcatatcataaagctgctttgatataaaaaaggtctatggccatactaccctgaatgagtcccatcccatctgatataaacaatctgcatattgggattgtcagggaatgttcttaaagatcagattagtggcacctgctgagatactgatgcacagcatggtttctgaaccagtagtttccctgcagttgagcagggagcagcagcagcacttgcacaaatacatatacactcttaacacttcttacctactggcttcctctagcttttgtggcagcttcaggtatatttagcactgaacgaacatctcaagaaggtataggcctttgtttgtaagtcctgctgtcctagcatcctataatcctggacttctccagtactttctggctggattggtatctgaggctagtaggaagggcttgttcctgctgggtagctctaaacaatgtattcatgggtaggaacagcagcctattctgccagccttatttctaaccattttagacatttgttagtacatggtattttaaaagtaaaacttaatgtcttccttttttttctccactgtctttttcatagatcgagacatgtaagcagcatcatggaggtaagtttttgaccttgagaaaatgtttttgtttcactgtcctgaggactatttatagacagctctaacatgataaccctcactatgtggagaacattgacagagtaacattttagcagggaaagaagaatcctacagggtcatgttcccttctcctgtggagtggcatgaagaaggtgtatggccccaggtatggccatattactgaccctctacagagagggcaaaggaactgccagtatggtattgcaggataaaggcaggtggttacccacattacctgcaaggctttgatctttcttctgccatttccacattggacatctctgctgaggagagaaaatgaaccactcttttcctttgtataatgttgttttattcttcagacagaagagaggagttatacagctctgcagacatcccattcctgtatggggactgtgtttgcctcttagaggttcccaggccactagaggagataaagggaaacagattgttataacttgatataatgatactataatagatgtaactacaaggagctccagaagcaagagagagggaggaacttggacttctctgcatctttagttggagtccaaaggcttttcaatgaaattctactgcccagggtacattgatgctgaaaccccattcaaatctcctgttatattctagaacagggaattgatttgggagagcatcaggaaggtggatgatctgcccagtcacactgttagtaaattgtagagccaggacctgaactctaatatagtcatgtgttacttaatgacggggacatgttctgagaaatgcttacacaaacctaggtgttgtagcctactacacgcataggctacatggtatagcctattgctcctagactacaaacctgtacagcctgttactgtactgaatactgtgggcagttgtaacacaatggtaagtatttgtgtatctaaacatagaagttgcagtaaaaatatgctattttaatcttatgagaccactgtcatatatacagtccatcattgaccaaaacatcatatcagcattttttcttctaagattttgggagcaccaaagggatacactaacaggatatactctttataatgggtttggagaactgtctgcagctacttcttttaaaaaggtgatctacacagtagaaattagacaagtttggtaatgagatctgcaatccaaataaaataaattcattgctaacctttttcttttcttttcaggtttgaagatgccgcatttggattggatgaattccaaattctgcttgcttgctttttaatattgatatgcttatacacttacactttatgcacaaaatgtagggttataataatgttaacatggacatgatcttctttataattctactttgagtgctgtctccatgtttgatgtatctgagcaggttgctccacaggtagctctaggagggctggcaacttagaggtggggagcagagaattctcttatccaacatcaacatcttggtcagatttgaactcttcaatctcttgcactcaaagcttgttaagatagttaagcgtgcataagttaacttccaatttacatactctgcttagaatttgggggaaaatttagaaatataattgacaggattattggaaatttgttataatgaatgaaacattttgtcatataagattcatatttacttcttatacatttgataaagtaaggcatggttgtggttaatctggtttatttttgttccacaagttaaataaatcataaaacttgatgtgttatctcttatatctcactcccactattacccctttattttcaaacagggaaacagtcttcaagttccacttggtaaaaaatgtgaaccccttgtatatagagtttggctcacagtgtaaagggcctcagtgattcacattttccagattaggaatctgatgctcaaagaagttaaatggcatagttggggtgacacagctgtctagtgggaggccagccttctatattttagccagcgttctttcctgcgggccaggtcatgaggagtatgcagactctaagagggagcaaaagtatctgaaggatttaatattttagcaaggaatagatatacaatcatcccttggtctccctgggggattggtttcaggaccccttcttggacaccaaatctatggatatttaagtcccttctataaaatggtatagtatttgcatataacctatccacatcctcctgtatactttaaatcatttctagattacttgtaatacctaatacaatgtaaatgctatgcaaatagttgttattgtttaaggaataatgacaagaaaaaaaagtctgtacatgctcagtaaagacacaaccatccctttttttccccagtgtttttgatccatggtttgctgaatccacagatgtggagcccctggatacggaaggcccgctgtactttgaatgacaaataacagatttaaa

SEQ ID NO: 469 - protein, 1131 aa, Homo sapiens
MRCLAPRPAGSYLSEPQGSSQCATMELGPLEGGYLELLNSDADPLCLYHFYDQMDLAGEEEIELYSEPDTDTINCDQFSRLLCDMEGDEETREAYANIAELDQYVFQDSQLEGLSKDIFIEHIGPDEVIGESMEMPAEVGQKSQKRPFPEELPADLKHWKPAEPPTVVTGSLLVGPVSDCSTLPCLPLPALFNQEPASGQMRLEKTDQIPMPFSSSSLSCLNLPEGPIQFVPTISTLPHGLWQISEAGTGVSSIFIYHGEVPQASQVPPPSGFTVHGLPTSPDRPGSTSPFAPSATDLPSMPEPALTSRANMTEHKTSPTQCPAAGEVSNKLPKWPEPVEQFYRSLQDTYGAEPAGPDGILVEVDLVQARLERSSSKSLERELATPDWAERQLAQGGLAEVLLAAKEHRRPRETRVIAVLGKAGQGKSYWAGAVSRAWACGRLPQYDFVFSVPCHCLNRPGDAYGLQDLLFSLGPQPLVAADEVFSHILKRPDRVLLILDGFEELEAQDGFLHSTCGPAPAEPCSLRGLLAGLFQKKLLRGCTLLLTARPRGRLVQSLSKADALFELSGFSMEQAQAYVMRYFESSGMTEHQDRALTLLRDRPLLLSHSHSPTLCRAVCQLSEALLELGEDAKLPSTLTGLYVGLLGRAALDSPPGALAELAKLAWELGRRHQSTLQEDQFPSADVRTWAMAKGLVQHPPRAAESELAFPSFLLQCFLGALWLALSGEIKDKELPQYLALTPRKKRPYDNWLEGVPRFLAGLIFQPPARCLGALLGPSAAASVDRKQKVLARYLKRLQPGTLRARQLLELLHCAHEAEEAGIWQHVVQELPGRLSFLGTRLTPPDAHVLGKALEAAGQDFSLDLRSTGICPSGLGSLVGLSCVTRFRAALSDTVALWESLQQHGETKLLQAAEEKFTIEPFKAKSLKDVEDLGKLVQTQRTRSSSEDTAGELPAVRDLKKLEFALGPVSGPQAFPKLVRILTAFSSLQHLDLDALSENKIGDEGVSQLSATFPQLKSLETLNLSQNNITDLGAYKLAEALPSLAASLLRLSLYNNCICDVGAESLARVLPDMVSLRVMDVQYNKFTAAGAQQLAASLRRCPHVETLAMWTPTIPFSVQEHLQQQDSRISLR

SEQ ID NO: 470 - DNA, 4657 bp, Homo sapiens
  source 1..4657: mol_type = genomic DNA
ggttagtgatgaggctagtgatgaggctgtgtgcttctgagctgggcatccgaaggcatccttggggaagctgagggcacgaggaggggctgccagactccgggagctgctgcctggctgggattcctacacaatgcgttgcctggctccacgccctgctgggtcctacctgtcagagccccaaggcagctcacagtgtgccaccatggagttggggcccctagaaggtggctacctggagcttcttaacagcgatgctgaccccctgtgcctctaccacttctatgaccagatggacctggctggagaagaagagattgagctctactcagaacccgacacagacaccatcaactgcgaccagttcagcaggctgttgtgtgacatggaaggtgatgaagagaccagggaggcttatgccaatatcgcggaactggaccagtatgtcttccaggactcccagctggagggcctgagcaaggacattttcatagagcacataggaccagatgaagtgatcggtgagagtatggagatgccagcagaagttgggcagaaaagtcagaaaagacccttcccagaggagcttccggcagacctgaagcactggaagccagctgagccccccactgtggtgactggcagtctcctagtgggaccagtgagcgactgctccaccctgccctgcctgccactgcctgcgctgttcaaccaggagccagcctccggccagatgcgcctggagaaaaccgaccagattcccatgcctttctccagttcctcgttgagctgcctgaatctccctgagggacccatccagtttgtccccaccatctccactctgccccatgggctctggcaaatctctgaggctggaacaggggtctccagtatattcatctaccatggtgaggtgccccaggccagccaagtaccccctcccagtggattcactgtccacggcctcccaacatctccagaccggccaggctccaccagccccttcgctccatcagccactgacctgcccagcatgcctgaacctgccctgacctcccgagcaaacatgacagagcacaagacgtcccccacccaatgcccggcagctggagaggtctccaacaagcttccaaaatggcctgagccggtggagcagttctaccgctcactgcaggacacgtatggtgccgagcccgcaggcccggatggcatcctagtggaggtggatctggtgcaggccaggctggagaggagcagcagcaagagcctggagcgggaactggccaccccggactgggcagaacggcagctggcccaaggaggcctggctgaggtgctgttggctgccaaggagcaccggcggccgcgtgagacacgagtgattgctgtgctgggcaaagctggtcagggcaagagctattgggctggggcagtgagccgggcctgggcttgtggccggcttccccagtacgactttgtcttctctgtcccctgccattgcttgaaccgtccgggggatgcctatggcctgcaggatctgctcttctccctgggcccacagccactcgtggcggccgatgaggttttcagccacatcttgaagagacctgaccgcgttctgctcatcctagacggcttcgaggagctggaagcgcaagatggcttcctgcacagcacgtgcggaccggcaccggcggagccctgctccctccgggggctgctggccggccttttccagaagaagctgctccgaggttgcaccctcctcctcacagcccggccccggggccgcctggtccagagcctgagcaaggccgacgccctatttgagctgtccggcttctccatggagcaggcccaggcatacgtgatgcgctactttgagagctcagggatgacagagcaccaagacagagccctgacgctcctccgggaccggccacttcttctcagtcacagccacagccctactttgtgccgggcagtgtgccagctctcagaggccctgctggagcttggggaggacgccaagctgccctccacgctcacgggactctatgtcggcctgctgggccgtgcagccctcgacagcccccccggggccctggcagagctggccaagctggcctgggagctgggccgcagacatcaaagtaccctacaggaggaccagttcccatccgcagacgtgaggacctgggcgatggccaaaggcttagtccaacacccaccgcgggccgcagagtccgagctggccttccccagcttcctcctgcaatgcttcctgggggccctgtggctggctctgagtggcgaaatcaaggacaaggagctcccgcagtacctagcattgaccccaaggaagaagaggccctatgacaactggctggagggcgtgccacgctttctggctgggctgatcttccagcctcccgcccgctgcctgggagccctactcgggccatcggcggctgcctcggtggacaggaagcagaaggtgcttgcgaggtacctgaagcggctgcagccggggacactgcgggcgcggcagctgctggagctgctgcactgcgcccacgaggccgaggaggctggaatttggcagcacgtggtacaggagctccccggccgcctctcttttctgggcacccgcctcacgcctcctgatgcacatgtactgggcaaggccttggaggcggcgggccaagacttctccctggacctccgcagcactggcatttgcccctctggattggggagcctcgtgggactcagctgtgtcacccgtttcagggctgccttgagcgacacggtggcgctgtgggagtccctgcagcagcatggggagaccaagctacttcaggcagcagaggagaagttcaccatcgagcctttcaaagccaagtccctgaaggatgtggaagacctgggaaagcttgtgcagactcagaggacgagaagttcctcggaagacacagctggggagctccctgctgttcgggacctaaagaaactggagtttgcgctgggccctgtctcaggcccccaggctttccccaaactggtgcggatcctcacggccttttcctccctgcagcatctggacctggatgcgctgagtgagaacaagatcggggacgagggtgtctcgcagctctcagccaccttcccccagctgaagtccttggaaaccctcaatctgtcccagaacaacatcactgacctgggtgcctacaaactcgccgaggccctgccttcgctcgctgcatccctgctcaggctaagcttgtacaataactgcatctgcgacgtgggagccgagagcttggctcgtgtgcttccggacatggtgtccctccgggtgatggacgtccagtacaacaagttcacggctgccggggcccagcagctcgctgccagccttcggaggtgtcctcatgtggagacgctggcgatgtggacgcccaccatcccattcagtgtccaggaacacctgcaacaacaggattcacggatcagcctgagatgatcccagctgtgctctggacaggcatgttctctgaggacactaaccacgctggaccttgaactgggtacttgtggacacagctcttctccaggctgtatcccatgagcctcagcatcctggcacccggcccctgctggttcagggttggcccctgcccggctgcggaatgaaccacatcttgctctgctgacagacacaggcccggctccaggctcctttagcgcccagttgggtggatgcctggtggcagctgcggtccacccaggagccccgaggccttctctgaaggacattgcggacagccacggccaggccagagggagtgacagaggcagccccattctgcctgcccaggcccctgccaccctggggagaaagtacttctttttttttatttttagacagagtctcactgttgcccaggctggcgtgcagtggtgcgatctgggttcactgcaacctccgcctcttgggttcaagcgattcttctgcttcagcctcccgagtagctgggactacaggcacccaccatcatgtctggctaatttttcatttttagtagagacagggttttgccatgttggccaggctggtctcaaactcttgacctcaggtgatccacccacctcagcctcccaaagtgctgggattacaagcgtgagccactgcaccgggccacagagaaagtacttctccaccctgctctccgaccagacaccttgacagggcacaccgggcactcagaagacactgatgggcaacccccagcctgctaattccccagattgcaacaggctgggcttcagtggcagctgcttttgtctatgggactcaatgcactgacattgttggccaaagccaaagctaggcctggccagatgcaccagcccttagcagggaaacagctaatgggacactaatggggcggtgagaggggaacagactggaagcacagcttcatttcctgtgtcttttttcactacattataaatgtctctttaatgtcacaggcaggtccagggtttgagttcataccctgttaccattttggggtacccactgctctggttatctaatatgtaacaagccaccccaaatcatagtggcttaaaacaacactcacattta

SEQ ID NO: 471 - protein, 223 aa, Homo sapiens
MACLGFQRHKAQLNLATRTWPCTLLFFLLFIPVFCKAMHVAQPAVVLASSRGIASFVCEYASPGKATEVRVTVLRQADSQVTEVCAATYMMGNELTFLDDSICTGTSSGNQVNLTIQGLRAMDTGLYICKVELMYPPPYYLGIGNGTQIYVIDPEPCPDSDFLLWILAAVSSGLFFYSFLLTAVSLSKMLKKRSPLTTGVYVKMPPTEPECEKQFQPYFIPIN

SEQ ID NO: 472 - protein, 358 aa, Homo sapiens
MVDGTLLLLLSEALALTQTWAGSHSLKYFHTSVSRPGRGEPRFISVGYVDDTQFVRFDNDAASPRMVPRAPWMEQEGSEYWDRETRSARDTAQIFRVNLRTLRGYYNQSEAGSHTLQWMHGCELGPDGRFLRGYEQFAYDGKDYLTLNEDLRSWTAVDTAAQISEQKSNDASEAEHQRAYLEDTCVEWLHKYLEKGKETLLHLEPPKTHVTHHPISDHEATLRCWALGFYPAEITLTWQQDGEGHTQDTELVETRPAGDGTFQKWAAVVVPSGEEQRYTCHVQHEGLPEPVTLRWKPASQPTIPIVGIIAGLVLLGSVVSGAVVAAVIWRKKSSGGKGGSYSKAEWSDSAQGSESHSL

SEQ ID NO: 473 - DNA, 2548 bp, Homo sapiens
  source 1..2548: mol_type = genomic DNA
ctcaggactcagaggctgggatcatggtagatggaaccctccttttactcctctcggaggccctggcccttacccagacctgggcgggctcccactccttgaagtatttccacacttccgtgtcccggcccggccgcggggagccccgcttcatctctgtgggctacgtggacgacacccagttcgtgcgcttcgacaacgacgccgcgagtccgaggatggtgccgcgggcgccgtggatggagcaggaggggtcagagtattgggaccgggagacacggagcgccagggacaccgcacagattttccgagtgaatctgcggacgctgcgcggctactacaatcagagcgaggccgggtctcacaccctgcagtggatgcatggctgcgagctggggcccgacgggcgcttcctccgcgggtatgaacagttcgcctacgacggcaaggattatctcaccctgaatgaggacctgcgctcctggaccgcggtggacacggcggctcagatctccgagcaaaagtcaaatgatgcctctgaggcggagcaccagagagcctacctggaagacacatgcgtggagtggctccacaaatacctggagaaggggaaggagacgctgcttcacctggagcccccaaagacacacgtgactcaccaccccatctctgaccatgaggccaccctgaggtgctgggccctgggcttctaccctgcggagatcacactgacctggcagcaggatggggagggccatacccaggacacggagctcgtggagaccaggcctgcaggggatggaaccttccagaagtgggcagctgtggtggtgccttctggagaggagcagagatacacgtgccatgtgcagcatgaggggctacccgagcccgtcaccctgagatggaagccggcttcccagcccaccatccccatcgtgggcatcattgctggcctggttctccttggatctgtggtctctggagctgtggttgctgctgtgatatggaggaagaagagctcaggtggaaaaggagggagctactctaaggctgagtggagcgacagtgcccaggggtctgagtctcacagcttgtaaagcctgagacagctgccttgtgtgcgactgagatgcacagctgccttgtgtgcgactgagatgcaggatttcctcacgcctcccctatgtgtcttaggggactctggcttctctttttgcaagggcctctgaatctgtctgtgtccctgttagcacaatgtgaggaggtagagaaacagtccacctctgtgtctaccatgacccccttcctcacactgacctgtgttccttccctgttctcttttctattaaaaataagaacctgggcagagtgcggcagctcatgcctgtaatcccagcacttagggaggccgaggagggcagatcacgaggtcaggagatcgaaaccatcctggctaacacggtgaaaccccgtctctactaaaaaatacaaaaaattagctgggcgcagaggcacgggcctgtagtcccagctactcaggaggcggaggcaggagaatggcgtcaacccgggaggcggaggttgcagtgagccaggattgtgcgactgcactccagcctgggtgacagggtgaaacgccatctcaaaaaataaaaattgaaaaataaaaaaagaacctggatctcaatttaatttttcatattcttgcaatgaaatggacttgaggaagctaagatcatagctagaaatacagataattccacagcacatctctagcaaatttagcctattcctattctctagcctattccttaccacctgtaatcttgaccatataccttggagttgaatattgttttcatactgctgtggtttgaatgttccctccaacactcatgttgagacttaatccctaatgtggcaatactgaaaggtggggcctttgagatgtgattggatcgtaaggctgtgccttcattcatgggttaatggattaatgggttatcacaggaatgggactggtggctttataagaagaggaaaagagaactgagctagcatgcccagcccacagagagcctccactagagtgatgctaagtggaaatgtgaggtgcagctgccacagagggcccccaccagggaaatgtctagtgtctagtggatccaggccacaggagagagtgccttgtggagcgctgggagcaggacctgaccaccaccaggaccccagaactgtggagtcagtggcagcatgcagcgcccccttgggaaagctttaggcaccagcctgcaacccattcgagcagccacgtaggctgcacccagcaaagccacaggcacggggctacctgaggccttgggggcccaatccctgctccagtgtgtccgtgaggcagcacacgaagtcaaaagagattattctcttcccacagataccttttctctcccatgaccctttaacagcatctgcttcattcccctcaccttcccaggctgatctgaggtaaactttgaagtaaaataaaagctgtgtttgagcatca

SEQ ID NO: 474 - protein, 343 aa, Homo sapiens
MKTPRMVVMAPRTLFLLLSGALTLTETWAGSHSMRYFSAAVSRPGRGEPRFIAMGYVDDTQFVRFDSDSACPRMEPRAPWVEQEGPEYWEEETRNTKAHAQTDRMNLQTLRGYYNQSEASSHTLQWMIGCDLGSDGRLLRGYEQYAYDGKDYLALNEDLRSWTAADTAAQISKRKCEAANVAEQRRAYLEGTCVEWLHRYLENGKEMLQRADPPKTHVTHHPVFDYEATLRCWALGFYPAEIILTWQRDGEDQTQDVELVETRPAGDGTFQKWAAVVVPSGEEQRYTCHVQHEGLPEPLMLRWKQSSLPTIPIMGIVAGLVVLAAVVTGAAVAAVLWRKKSSD

SEQ ID NO: 475 - DNA, 1386 bp, Homo sapiens
  source 1..1386: mol_type = genomic DNA
atatagtaacatagtgtggtactttgtcttgaggagatgtcctggactcacacggaaacttagggctacggaatgaagacgccaaggatggtggtcatggcgccccgaaccctcttcctgctgctctcgggggccctgaccctgaccgagacctgggcgggctcccactccatgaggtatttcagcgccgccgtgtcccggcccggccgcggggagccccgcttcatcgccatgggctacgtggacgacacgcagttcgtgcggttcgacagcgactcggcgtgtccgaggatggagccgcgggcgccgtgggtggagcaggaggggccggagtattgggaagaggagacacggaacaccaaggcccacgcacagactgacagaatgaacctgcagaccctgcgcggctactacaaccagagcgaggccagttctcacaccctccagtggatgattggctgcgacctggggtccgacggacgcctcctccgcgggtatgaacagtatgcctacgatggcaaggattacctcgccctgaacgaggacctgcgctcctggaccgcagcggacactgcggctcagatctccaagcgcaagtgtgaggcggccaatgtggctgaacaaaggagagcctacctggagggcacgtgcgtggagtggctccacagatacctggagaacgggaaggagatgctgcagcgcgcggacccccccaagacacacgtgacccaccaccctgtctttgactatgaggccaccctgaggtgctgggccctgggcttctaccctgcggagatcatactgacctggcagcgggatggggaggaccagacccaggacgtggagctcgtggagaccaggcctgcaggggatggaaccttccagaagtgggcagctgtggtggtgccttctggagaggagcagagatacacgtgccatgtgcagcatgaggggctgccggagcccctcatgctgagatggaagcagtcttccctgcccaccatccccatcatgggtatcgttgctggcctggttgtccttgcagctgtagtcactggagctgcggtcgctgctgtgctgtggagaaagaagagctcagattgaaaaggagggagctactctcaggctgcaatgtgaaacagctgccctgtgtgggactgagtggcaagtccctttgtgacttcaagaaccctgactcctctttgtgcagagaccagcccacccctgtgcccaccatgaccctcttcctcatgctgaactgcattccttccccaatcacctttcctgttccagaaaaggggctgggatgtctccgtctctgtctcaaatttgtggtccactgagctataacttacttctgtattaaaattagaatctgagtataaa

SEQ ID NO: 476 - protein, 360 aa, Homo sapiens
MWEAQFLGLLFLQPLWVAPVKPLQPGAEVPVVWAQEGAPAQLPCSPTIPLQDLSLLRRAGVTWQHQPDSGPPAAAPGHPLAPGPHPAAPSSWGPRPRRYTVLSVGPGGLRSGRLPLQPRVQLDERGRQRGDFSLWLRPARRADAGEYRAAVHLRDRALSCRLRLRLGQASMTASPPGSLRASDWVILNCSFSRPDRPASVHWFRNRGQGRVPVRESPHHHLAESFLFLPQVSPMDSGPWGCILTYRDGFNVSIMYNLTVLGLEPPTPLTVYAGAGSRVGLPCRLPAGVGTRSFLTAKWTPPGGGPDLLVTGDNGDFTLRLEDVSQAQAGTYTCHIHLQEQQLNATVTLAIITGQPQVGKE

SEQ ID NO: 477 - DNA, 1083 bp, Homo sapiens
  source 1..1083: mol_type = genomic DNA
atgtgggaggctcagttcctgggcttgctgtttctgcagccgctttgggtggctccagtgaagcctctccagccaggggctgaggtcccggtggtgtgggcccaggagggggctcctgcccagctcccctgcagccccacaatccccctccaggatctcagccttctgcgaagagcaggggtcacttggcagcatcagccagacagtggcccgcccgctgccgcccccggccatcccctggcccccggccctcacccggcggcgccctcctcctgggggcccaggccccgccgctacacggtgctgagcgtgggtcccggaggcctgcgcagcgggaggctgcccctgcagccccgcgtccagctggatgagcgcggccggcagcgcggggacttctcgctatggctgcgcccagcccggcgcgcggacgccggcgagtaccgcgccgcggtgcacctcagggaccgcgccctctcctgccgcctccgtctgcgcctgggccaggcctcgatgactgccagccccccaggatctctcagagcctccgactgggtcattttgaactgctccttcagccgccctgaccgcccagcctctgtgcattggttccggaaccggggccagggccgagtccctgtccgggagtccccccatcaccacttagcggaaagcttcctcttcctgccccaagtcagccccatggactctgggccctggggctgcatcctcacctacagagatggcttcaacgtctccatcatgtataacctcactgttctgggtctggagcccccaactcccttgacagtgtacgctggagcaggttccagggtggggctgccctgccgcctgcctgctggtgtggggacccggtctttcctcactgccaagtggactcctcctgggggaggccctgacctcctggtgactggagacaatggcgactttacccttcgactagaggatgtgagccaggcccaggctgggacctacacctgccatatccatctgcaggaacagcagctcaatgccactgtcacattggcaatcatcacaggtcagcctcaggtgggaaaggagtag

SEQ ID NO: 478 - protein, 288 aa, Homo sapiens
MQIPQAPWPVVWAVLQLGWRPGWFLDSPDRPWNPPTFSPALLVVTEGDNATFTCSFSNTSESFVLNWYRMSPSNQTDKLAAFPEDRSQPGQDCRFRVTQLPNGRDFHMSVVRARRNDSGTYLCGAISLAPKAQIKESLRAELRVTERRAEVPTAHPSPSPRPAGQFQTLVVGVVGGLLGSLVLLVWVLAVICSRAARGTIGARRTGQPLKEDPSAVPVFSVDYGELDFQWREKTPEPPVPCVPEQTEYATIVFPSGMGTSSPARRGSADGPRSAQPLRPEDGHCSWPL

SEQ ID NO: 479 - DNA, 867 bp, Homo sapiens
  source 1..867: mol_type = genomic DNA
atgcagatcccacaggcgccctggccagtcgtctgggcggtgctacaactgggctggcggccaggatggttcttagactccccagacaggccctggaacccccccaccttctccccagccctgctcgtggtgaccgaaggggacaacgccaccttcacctgcagcttctccaacacatcggagagcttcgtgctaaactggtaccgcatgagccccagcaaccagacggacaagctggccgccttccccgaggaccgcagccagcccggccaggactgccgcttccgtgtcacacaactgcccaacgggcgtgacttccacatgagcgtggtcagggcccggcgcaatgacagcggcacctacctctgtggggccatctccctggcccccaaggcgcagatcaaagagagcctgcgggcagagctcagggtgacagagagaagggcagaagtgcccacagcccaccccagcccctcacccaggccagccggccagttccaaaccctggtggttggtgtcgtgggcggcctgctgggcagcctggtgctgctagtctgggtcctggccgtcatctgctcccgggccgcacgagggacaataggagccaggcgcaccggccagcccctgaaggaggacccctcagccgtgcctgtgttctctgtggactatggggagctggatttccagtggcgagagaagaccccggagccccccgtgccctgtgtccctgagcagacggagtatgccaccattgtctttcctagcggaatgggcacctcatcccccgcccgcaggggctcagccgacggccctcggagtgcccagccactgaggcctgaggatggacactgctcttggcccctctga

SEQ ID NO: 480 - protein, 301 aa, Homo sapiens
MFSHLPFDCVLLLLLLLLTRSSEVEYRAEVGQNAYLPCFYTPAAPGNLVPVCWGKGACPVFECGNVVLRTDERDVNYWTSRYWLNGDFRKGDVSLTIENVTLADSGIYCCRIQIPGIMNDEKFNLKLVIKPAKVTPAPTLQRDFTAAFPRMLTTRGHGPAETQTLGSLPDINLTQISTLANELRDSRLANDLRDSGATIRIGIYIGAGICAGLALALIFGALIFKWYSHSKEKIQNLSLISLANLPPSGLANAVAEGIRSEENIYTIEENVYEVEEPNEYYCYVSSRQQPSQPLGCRFAMP

SEQ ID NO: 481 - DNA, 906 bp, Homo sapiens
  source 1..906: mol_type = genomic DNA
atgttttcacatcttccctttgactgtgtcctgctgctgctgctgctactacttacaaggtcctcagaagtggaatacagagcggaggtcggtcagaatgcctatctgccctgcttctacaccccagccgccccagggaacctcgtgcccgtctgctggggcaaaggagcctgtcctgtgtttgaatgtggcaacgtggtgctcaggactgatgaaagggatgtgaattattggacatccagatactggctaaatggggatttccgcaaaggagatgtgtccctgaccatagagaatgtgactctagcagacagtgggatctactgctgccggatccaaatcccaggcataatgaatgatgaaaaatttaacctgaagttggtcatcaaaccagccaaggtcacccctgcaccgactctgcagagagacttcactgcagcctttccaaggatgcttaccaccaggggacatggcccagcagagacacagacactggggagcctccctgatataaatctaacacaaatatccacattggccaatgagttacgggactctagattggccaatgacttacgggactctggagcaaccatcagaataggcatctacatcggagcagggatctgtgctgggctggctctggctcttatcttcggcgctttaattttcaaatggtattctcatagcaaagagaagatacagaatttaagcctcatctctttggccaacctccctccctcaggattggcaaatgcagtagcagagggaattcgctcagaagaaaacatctataccattgaagagaacgtatatgaagtggaggagcccaatgagtattattgctatgtcagcagcaggcagcaaccctcacaacctttgggttgtcgctttgcaatgccatag

SEQ ID NO: 482 - protein, 176 aa, Homo sapiens
DLNKVFPPEVAVFEPSEAEISHTQKATLVCLATGFFPDHVELSWWVNGKEVHSGVSTDPQPLKEQPALNDSRYCLSSRLRVSATFWQNPRNHFRCQVQFYGLSENDEWTQDRAKPVTQIVSAEAWGRADCGFTSVSYQQGVLSATILYEILLGKATLYAVLVSALVLMAMVKRKDF

SEQ ID NO: 483 - protein, 503 aa, Homo sapiens
MEAAVAAPRPRLLLLVLAAAAAAAAALLPGATALQCFCHLCTKDNFTCVTDGLCFVSVTETTDKVIHNSMCIAEIDLIPRDRPFVCAPSSKTGSVTTTYCCNQDHCNKIELPTTVKSSPGLGPVELAAVIAGPVCFVCISLMLMVYICHNRTVIHHRVPNEEDPSLDRPFISEGTTLKDLIYDMTTSGSGSGLPLLVQRTIARTIVLQESIGKGRFGEVWRGKWRGEEVAVKIFSSREERSWFREAEIYQTVMLRHENILGFIAADNKDNGTWTQLWLVSDYHEHGSLFDYLNRYTVTVEGMIKLALSTASGLAHLHMEIVGTQGKPAIAHRDLKSKNILVKKNGTCCIADLGLAVRHDSATDTIDIAPNHRVGTKRYMAPEVLDDSINMKHFESFKRADIYAMGLVFWEIARRCSIGGIHEDYQLPYYDLVPSDPSVEEMRKVVCEQKLRPNIPNRWQSCEALRVMAKIMRECWYANGAARLTALRIKKTLSQLSQQEGIKM

SEQ ID NO: 484 - DNA, 1509 bp, Homo sapiens
  source 1..1509: mol_type = genomic DNA
atggaggcggcggtcgctgctccgcgtccccggctgctcctcctcgtgctggcggcggcggcggcggcggcggcggcgctgctcccgggggcgacggcgttacagtgtttctgccacctctgtacaaaagacaattttacttgtgtgacagatgggctctgctttgtctctgtcacagagaccacagacaaagttatacacaacagcatgtgtatagctgaaattgacttaattcctcgagataggccgtttgtatgtgcaccctcttcaaaaactgggtctgtgactacaacatattgctgcaatcaggaccattgcaataaaatagaacttccaactactgtaaagtcatcacctggccttggtcctgtggaactggcagctgtcattgctggaccagtgtgcttcgtctgcatctcactcatgttgatggtctatatctgccacaaccgcactgtcattcaccatcgagtgccaaatgaagaggacccttcattagatcgcccttttatttcagagggtactacgttgaaagacttaatttatgatatgacaacgtcaggttctggctcaggtttaccattgcttgttcagagaacaattgcgagaactattgtgttacaagaaagcattggcaaaggtcgatttggagaagtttggagaggaaagtggcggggagaagaagttgctgttaagatattctcctctagagaagaacgttcgtggttccgtgaggcagagatttatcaaactgtaatgttacgtcatgaaaacatcctgggatttatagcagcagacaataaagacaatggtacttggactcagctctggttggtgtcagattatcatgagcatggatccctttttgattacttaaacagatacacagttactgtggaaggaatgataaaacttgctctgtccacggcgagcggtcttgcccatcttcacatggagattgttggtacccaaggaaagccagccattgctcatagagatttgaaatcaaagaatatcttggtaaagaagaatggaacttgctgtattgcagacttaggactggcagtaagacatgattcagccacagataccattgatattgctccaaaccacagagtgggaacaaaaaggtacatggcccctgaagttctcgatgattccataaatatgaaacattttgaatccttcaaacgtgctgacatctatgcaatgggcttagtattctgggaaattgctcgacgatgttccattggtggaattcatgaagattaccaactgccttattatgatcttgtaccttctgacccatcagttgaagaaatgagaaaagttgttttgaacagaagttaaggccaaatatcccaaacagatggcagagctgtgaagccttgagagtaatggctaaaattagagagaatgttggtatgccaatggagcagctaggcttacagcattgcggattaagaaaacattatcgcaactcatcaacaggaaggcatcaaaatgtaa

SEQ ID NO: 485 - protein, 567 aa, Homo sapiens
MGRGLLRGLWPLHIVLWTRIASTIPPHVQKSVNNDMIVTDNNGAVKFPQLCKFCDVRFSTCDNQKSCMSNCSITSICEKPQEVCVAVWRKNDENITLETVCHDPKLPYHDFILEDAASPKCIMKEKKKPGETFFMCSCSSDECNDNIIFSEEYNTSNPDLLLVIFQVTGISLLPPLGVAISVIIIFYCYRVNRQQKLSSTWETGKTRKLMEFSEHCAIILEDDRSDISSTCANNINHNTELLPIELDTLVGKGRFAEVYKAKLKQNTSEQFETVAVKIFPYEEYASWKTEKDIFSDINLKHENILQFLTAEERKTELGKQYWLITAFHAKGNLQEYLTRHVISWEDLRKLGSSLARGIAHLHSDHTPCGRPKMPIVHRDLKSSNILVKNDLTCCLCDFGLSLRLDPTLSVDDLANSGQVGTARYMAPEVLESRMNLENAESFKQTDVYSMALVLWEMTSRCNAVGEVKDYEPPFGSKVREHPCVESMKDNVLRDRGRPEIPSFWLNHQGIQMVCETLTECWDHDPEARLTAQCVAERFSELEHLDRLSGRSCSEEKIPEDGSLNTTK

SEQ ID NO: 486 - DNA, 1703 bp, Homo sapiens
  source 1..1703: mol_type = genomic DNA
atgggtcgggggctgctcaggggcctgtggccgctgcacatcgtcctgtggacgcgtatcgccagcacgatcccaccgcacgttcagaagtcggttaataacgacatgatagtcactgacaacaacggtgcagtcaagtttccacaactgtgtaaattttgtgatgtgagattttccacctgtgacaaccagaaatcctgcatgagcaactgcagcatcacctccatctgtgagaagccacaggaagtctgtgtggctgtatggagaaagaatgacgagaacataacactagagacagtttgccatgaccccaagctcccctaccatgactttattctggaagatgctgcttctccaaagtgcattatgaaggaaaaaaaaaagcctggtgagactttcttcatgtgttcctgtagctctgatgagtgcaatgacaacatcatcttctcagaagaatataacaccagcaatcctgacttgttgctagtcatatttcaagtgacaggcatcagcctcctgccaccactgggagttgccatatctgtcatcatcatcttctactgctaccgcgttaaccggcagcagaagctgagttcaacctgggaaaccggcaagacgcggaagctcatggagttcagcgagcactgtgccatcatcctggaagatgaccgctctgacatcagctccacgtgtgccaacaacatcaaccacaacacagagctgctgcccattgagctggacaccctggtggggaaaggtcgctttgctgaggtctataaggccaagctgaagcagaacacttcagagcagtttgagacagtggcagtcaagatctttccctatgaggagtatgcctcttggaagacagagaaggacatcttctcagacatcaatctgaagcatgagaacatactccagttcctgacggctgaggagcggaagacggagttggggaaacaatactggctgatcaccgccttccacgccaagggcaacctacaggagtacctgacgcggcatgtcatcagctgggaggacctgcgcaagctgggcagctccctcgcccgggggattgctcacctccacagtgatcacactccatgtgggaggcccaagatgcccatcgtgcacagggacctcaagagctccaatatcctcgtgaagaacgacctaacctgctgcctgtgtgactttgggctttccctgcgtctggaccctactctgtctgtggatgacctggctaacagtgggcaggtgggaactgcaagatacatggctccagaagtcctagaatccaggatgaatttggagaatgctgagtccttcaagcagaccgatgtctactccatggctctggtgctctgggaaatgacatctcgctgtaatgcagtgggagaagtaaaagattatgagcctccatttggttccaaggtgcgggagcacccctgtgtcgaaagcatgaaggacaacgtgttgagagatcgagggcgaccagaaattcccagcttctggctcaaccaccaggcatccagatggtgtgtgagacgttgactgagtgctgggaccacgacccagaggcccgtctcacagcccagtgtgtggcagaacgcttcagtgagctggagcatctggacaggctctcggggaggagctgctcggaggagaagattcctgaagacggctccctaaacactaccaaatag

SEQ ID NO: 487 - protein, 140 aa, Homo sapiens
IQNPDPAVYQLRDSKSSDKSVCLFTDFDSQTNVSQSKDSDVYITDKTVLDMRSMDFKSNSAVAWSNKSDFACANAFNNSIIPEDTFFPSPESSCDVKLVEKSFETDTNLNFQNLSVIGFRILLLKVAGFNLLMTLRLWSS

SEQ ID NO: 488 - DNA, 5651 bp, Homo sapiens
  source 1..5651: mol_type = genomic DNA
catgctaatcctccggcaaacctctgtttcctcctcaaaaggcaggaggtcggaaagaataaacaatgagagtcacattaaaaacacaaaatcctacggaaatactgaagaatgagtctcagcactaaggaaaagcctccagcagctcctgctttctgagggtgaaggatagacgctgtggctctgcatgactcactagcactctatcacggccatattctggcagggtcagtggctccaactaacatttgtttggtactttacagtttattaaatagatgtttatatggagaagctctcatttctttctcagaagagcctggctaggaaggtggatgaggcaccatattcattttgcaggtgaaattcctgagatgtaaggagctgctgtgacttgctcaaggccttatatcgagtaaacggtagtgctggggcttagacgcaggtgttctgatttatagttcaaaacctctatcaatgagagagcaatctcctggtaatgtgatagatttcccaacttaatgccaacataccataaacctcccattctgctaatgcccagcctaagttggggagaccactccagattccaagatgtacagtttgctttgctgggcctttttcccatgcctgcctttactctgccagagttatattgctggggttttgaagaagatcctattaaataaaagaataagcagtattattaagtagccctgcatttcaggtttccttgagtggcaggccaggcctggccgtgaacgttcactgaaatcatggcctcttggccaagattgatagcttgtgcctgtccctgagtcccagtccatcacgagcagctggtttctaagatgctatttcccgtataaagcatgagaccgtgacttgccagccccacagagccccgcccttgtccatcactggcatctggactccagcctgggttggggcaaagagggaaatgagatcatgtcctaaccctgatcctcttgtcccacagatatccagaaccctgaccctgccgtgtaccagctgagagactctaaatccagtgacaagtctgtctgcctattcaccgattttgattctcaaacaaatgtgtcacaaagtaaggattctgatgtgtatatcacagacaaaactgtgctagacatgaggtctatggacttcaagagcaacagtgctgtggcctggagcaacaaatctgactttgcatgtgcaaacgccttcaacaacagcattattccagaagacaccttcttccccagcccaggtaagggcagctttggtgccttcgcaggctgtttccttgcttcaggaatggccaggttctgcccagagctctggtcaatgatgtctaaaactcctctgattggtggtctcggccttatccattgccaccaaaaccctctttttactaagaaacagtgagccttgttctggcagtccagagaatgacacgggaaaaaagcagatgaagagaaggtggcaggagagggcacgtggcccagcctcagtctctccaactgagttcctgcctgcctgcctttgctcagactgtttgccccttactgctcttctaggcctcattctaagccccttctccaagttgcctctccttatttctccctgtctgccaaaaaatctttcccagctcactaagtcagtctcacgcagtcactcattaacccaccaatcactgattgtgccggcacatgaatgcaccaggtgttgaagtggaggaattaaaaagtcagatgaggggtgtgcccagaggaagcaccattctagttgggggagcccatctgtcagctgggaaaagtccaaataacttcagattggaatgtgttttaactcagggttgagaaaacagctaccttcaggacaaaagtcagggaagggctctctgaagaaatgctacttgaagataccagccctaccaagggcagggagaggaccctatagaggcctgggacaggagctcaatgagaaaggagaagagcagcaggcatgagttgaatgaaggaggcagggccgggtcacagggccttctaggccatgagagggtagacagtattctaaggacgccagaaagctgttgatcggcttcaagcaggggagggacacctaatttgcttttcttttttttttttttttttttttttttttttgagatggagttttgctcttgttgcccaggctggagtgcaatggtgcatcttggctcactgcaacctccgcctcccaggttcaagtgattctcctgcctcagcctcccgagtagctgagattacaggcacccgccaccatgcctggctaattttttgtatttttagtagagacagggtttcactatgttggccaggctggtctcgaactcctgacctcaggtgatccacccgcttcagcctcccaaagtgctgggattacaggcgtgagccaccacacccggcctgcttttcttaaagatcaatctgagtgctgtacggagagtgggttgtaagccaagagtagaagcagaaagggagcagttgcagcagagagatgatggaggcctgggcagggtggtggcagggaggtaaccaacaccattcaggtttcaaaggtagaaccatgcagggatgagaaagcaaagaggggatcaaggaaggcagctggattttggcctgagcagctgagtcaatgatagtgccgtttactaagaagaaaccaaggaaaaaatttggggtgcagggatcaaaactttttggaacatatgaaagtacgtgtttatactctttatggcccttgtcactatgtatgcctcgctgcctccattggactctagaatgaagccaggcaagagcagggtctatgtgtgatggcacatgtggccagggtcatgcaacatgtactttgtacaaacagtgtatattgagtaaatagaaatggtgtccaggagccgaggtatcggtcctgccagggccaggggctctccctagcaggtgctcatatgctgtaagttccctccagatctctccacaaggaggcatggaaaggctgtagttgttcacctgcccaagaactaggaggtctggggtgggagagtcagcctgctctggatgctgaaagaatgtctgtttttccttttagaaagttcctgtgatgtcaagctggtcgagaaaagctttgaaacaggtaagacaggggtctagcctgggtttgcacaggattgcggaagtgatgaacccgcaataaccctgcctggatgagggagtgggaagaaattagtagatgtgggaatgaatgatgaggaatggaaacagcggttcaagacctgcccagagctgggtggggtctctcctgaatccctctcaccatctctgactttccattctaagcactttgaggatgagtttctagcttcaatagaccaaggactctctcctaggcctctgtattcctttcaacagctccactgtcaagagagccagagagagcttctgggtggcccagctgtgaaatttctgagtcccttagggatagccctaaacgaaccagatcatcctgaggacagccaagaggttttgccttctttcaagacaagcaacagtactcacataggctgtgggcaatggtcctgtctctcaagaatcccctgccactcctcacacccaccctgggcccatattcatttccatttgagttgttcttattgagtcatccttcctgtggtagcggaactcactaaggggcccatctggacccgaggtattgtgatgataaattctgagcacctaccccatccccagaagggctcagaaataaaataagagccaagtctagtcggtgtttcctgtcttgaaacacaatactgttggccctggaagaatgcacagaatctgtttgtaaggggatatgcacagaagctgcaagggacaggaggtgcaggagctgcaggcctcccccacccagcctgctctgccttggggaaaaccgtgggtgtgtcctgcaggccatgcaggcctgggacatgcaagcccataaccgctgtggcctcttggttttacagatacgaacctaaactttcaaaacctgtcagtgattgggttccgaatcctcctcctgaaagtggccgggtttaatctgctcatgacgctgcggctgtggtccagctgaggtgaggggccttgaagctgggagtggggtttagggacgcgggtctctgggtgcatcctaagctctgagagcaaacctccctgcagggtcttgcttttaagtccaaagcctgagcccaccaaactctcctacttcttcctgttacaaattcctcttgtgcaataataatggcctgaaacgctgtaaaatatcctcatttcagccgcctcagttgcacttctcccctatgaggtaggaagaacagttgtttagaaacgaagaaactgaggccccacagctaatgagtggaggaagagagacacttgtgtacaccacatgccttgtgttgtacttctctcaccgtgtaacctcctcatgtcctctctccccagtacggctctcttagctcagtagaaagaagacattacactcatattacaccccaatcctggctagagtctccgcaccctcctcccccagggtccccagtcgtcttgctgacaactgcatcctgttccatcaccatcaaaaaaaaactccaggctgggtgcgggggctcacacctgtaatcccagcactttgggaggcagaggcaggaggagcacaggagctggagaccagcctgggcaacacagggagaccccgcctctacaaaaagtgaaaaaattaaccaggtgtggtgctgcacacctgtagtcccagctacttaagaggctgagatgggaggatcgcttgagccctggaatgttgaggctacaatgagctgtgattgcgtcactgcactccagcctggaagacaaagcaagatcctgtctcaaataataaaaaaaataagaactccagggtacatttgctcctagaactctaccacatagccccaaacagagccatcaccatcacatccctaacagtcctgggtcttcctcagtgtccagcctgacttctgttcttcctcattccagatctgcaagattgtaagacagcctgtgctccctcgctccttcctctgcattgcccctcttctccctctccaaacagagggaactctcctacccccaaggaggtgaaagctgctaccacctctgtgcccccccggcaatgccaccaactggatcctacccgaatttatgattaagattgctgaagagctgccaaacactgctgccaccccctctgttcccttattgctgcttgtcactgcctgacattcacggcagaggcaaggctgctgcagcctcccctggctgtgcacattccctcctgctccccagagactgcctccgccatcccacagatgatggatcttcagtgggttctcttgggctctaggtcctgcagaatgttgtgaggggtttatttttttttaatagtgttcataaagaaatacatagtattcttcttctcaagacgtggggggaaattatctcattatcgaggccctgctatgctgtgtatctgggcgtgttgtatgtcctgctgccgatgccttcattaaaatgatttggaagagcaga

SEQ ID NO: 489 - DNA, 1508 bp, Homo sapiens
  source 1..1508: mol_type = genomic DNA
ttttgaaacccttcaaaggcagagacttgtccagcctaacctgcctgctgctcctagctcctgaggctcagggcccttggcttctgtccgctctgctcagggccctccagcgtggccactgctcagccatgctcctgctgctcgtcccagtgctcgaggtgatttttaccctgggaggaaccagagcccagtcggtgacccagcttggcagccacgtctctgtctctgaaggagccctggttctgctgaggtgcaactactcatcgtctgttccaccatatctcttctggtatgtgcaataccccaaccaaggactccagcttctcctgaagtacacatcagcggccaccctggttaaaggcatcaacggttttgaggctgaatttaagaagagtgaaacctccttccacctgacgaaaccctcagcccatatgagcgacgcggctgagtacttctgtgctgtgagtgatctcgaaccgaacagcagtgcttccaagataatctttggatcagggaccagactcagcatccggccaaatatccagaaccctgaccctgccgtgtaccagctgagagactctaaatccagtgacaagtctgtctgcctattcaccgattttgattctcaaacaaatgtgtcacaaagtaaggattctgatgtgtatatcacagacaaaactgtgctagacatgaggtctatggacttcaagagcaacagtgctgtggcctggagcaacaaatctgactttgcatgtgcaaacgccttcaacaacagcattattccagaagacaccttcttccccagcccagaaagttcctgtgatgtcaagctggtcgagaaaagctttgaaacagatacgaacctaaactttcaaaacctgtcagtgattgggttccgaatcctcctcctgaaagtggccgggtttaatctgctcatgacgctgcggctgtggtccagctgagatctgcaagattgtaagacagcctgtgctccctcgctccttcctctgcattgcccctcttctccctctccaaacagagggaactctcctacccccaaggaggtgaaagctgctaccacctctgtgcccccccggtaatgccaccaactggatcctacccgaatttatgattaagattgctgaagagctgccaaacactgctgccaccccctctgttcccttattgctgcttgtcactgcctgacattcacggcagaggcaaggctgctgcagcctcccctggctgtgcacattccctcctgctccccagagactgcctccgccatcccacagatgatggatcttcagtgggttctcttgggctctaggtcctggagaatgttgtgaggggtttatttttttttaatagtgttcataaagaaatacatagtattcttcttctcaagacgtggggggaaattatctcattatcgaggccctgctatgctgtgtgtctgggcgtgttgtatgtcctgctgccgatgccttcattaaaatgatttggaa

SEQ ID NO: 490 - RNA, 20 nt, synthetic construct
  source 1..20: mol_type = other RNA
ccatgggtcgggggctgctc

SEQ ID NO: 491 - RNA, 20 nt, synthetic construct
  source 1..20: mol_type = other RNA
ttacctgcccactgttagcc

SEQ ID NO: 492 - RNA, 20 nt, synthetic construct
  source 1..20: mol_type = other RNA
cccgctacagggcatccaga

SEQ ID NO: 493 - RNA, 20 nt, synthetic construct
  source 1..20: mol_type = other RNA
gttttacagacaatggtact

SEQ ID NO: 494 - RNA, 20 nt, synthetic construct
  source 1..20: mol_type = other RNA
cttgtaggccttgagagtaa

SEQ ID NO: 495 - RNA, 20 nt, synthetic construct
  source 1..20: mol_type = other RNA
tgaagcgttctgccacacac

SEQ ID NO: 496 - RNA, 22 nt, synthetic construct
  source 1..22: mol_type = other RNA
tggaagatgctgcttctccaaa

SEQ ID NO: 497 - RNA, 22 nt, synthetic construct
  source 1..22: mol_type = other RNA
tgaaggaaaaaaaaaagcctgg

SEQ ID NO: 498 - RNA, 22 nt, synthetic construct
  source 1..22: mol_type = other RNA
cactcatcagagctacaggaac

SEQ ID NO: 499 - RNA, 22 nt, synthetic construct
  source 1..22: mol_type = other RNA
caagtgacaggcatcagcctcc

SEQ ID NO: 500 - RNA, 22 nt, synthetic construct
  source 1..22: mol_type = other RNA
ctcacctccacagtgatcacac

SEQ ID NO: 501 - RNA, 22 nt, synthetic construct
  source 1..22: mol_type = other RNA
atgtctgagaagatgtccttct

SEQ ID NO: 502 - RNA, 22 nt, synthetic construct
  source 1..22: mol_type = other RNA
taggacttctggagccatgtat

SEQ ID NO: 503 - RNA, 22 nt, synthetic construct
  source 1..22: mol_type = other RNA
ggagaatgttgagtccttcaag

SEQ ID NO: 504 - RNA, 22 nt, synthetic construct
  source 1..22: mol_type = other RNA
cccagagcaccagagccatgga

SEQ ID NO: 505 - RNA, 22 nt, synthetic construct
  source 1..22: mol_type = other RNA
tgagcctccatttggttccaag

SEQ ID NO: 506 - RNA, 22 nt, synthetic construct
  source 1..22: mol_type = other RNA
ctggtcgccctcgatctctcaa

SEQ ID NO: 507 - RNA, 22 nt, synthetic construct
  source 1..22: mol_type = other RNA
ccagcttctggctcaaccacca

SEQ ID NO: 508 - RNA, 20 nt, synthetic construct
  source 1..20: mol_type = other RNA
tctccccaggtacaatggct

SEQ ID NO: 509 - RNA, 20 nt, synthetic construct
  source 1..20: mol_type = other RNA
ctgctcaccggagcgggatg

SEQ ID NO: 510 - RNA, 20 nt, synthetic construct
  source 1..20: mol_type = other RNA
tttcagaactacagttcctg

SEQ ID NO: 511 - RNA, 20 nt, synthetic construct
  source 1..20: mol_type = other RNA
ctggattacctcttgccctc

SEQ ID NO: 512 - RNA, 20 nt, synthetic construct
  source 1..20: mol_type = other RNA
cttaccccacttaactatct

SEQ ID NO: 513 - RNA, 20 nt, synthetic construct
  source 1..20: mol_type = other RNA
cactcaccttagcctgagca

SEQ ID NO: 514 - RNA, 20 nt, synthetic construct
  source 1..20: mol_type = other RNA
cacctacctaagaaccatcc

SEQ ID NO: 515 - RNA, 22 nt, synthetic construct
  source 1..22: mol_type = other RNA
cccagagcaccagagccatgga

What is claimed is:

1. A method for reducing the expression of an Adenosine A2A Receptor Adenosine (A2AR) or A_{2B} Receptor (A2BR) or HIF1α.I3 polypeptide and/or polynucleotide in a cell, the method comprising contacting a cell comprising an A2AR, A2BR, HIF1α, or HIF1α.I3 gene with (i) a base editor or a polynucleotide encoding the base editor and (ii) one or more guide polynucleotides or a polynucleotide encoding the guide polynucleotides, wherein the base editor comprises a programmable DNA binding domain and a deaminase domain, and wherein each of the guide polynucleotides directs the base editor to effect a nucleobase alteration in a A2AR, A2BR, HIF1α, or HIF1α.I3 gene that alters a splice acceptor or splice donor site, introduces a stop codon, or otherwise disrupts expression of the gene, thereby reducing expression of an A2AR, A2BR, HIF1α.I3 polypeptide and/or polynucleotide in the cell.

2. A method for producing a modified immune cell comprising an alteration in a hypoxic and/or adenosinergic pathway, the method comprising contacting the cell with (i) a base editor or a polynucleotide encoding the base editor and (ii) one or more guide polynucleotides or a polynucleotide encoding the guide polynucleotides, wherein the base editor comprises a programmable DNA binding domain and a deaminase domain, and wherein each of the guide polynucleotides directs the base editor to effect a nucleobase alteration in a gene encoding a polypeptide component of the hypoxic and/or adenosinergic pathway or a regulatory element thereof, thereby producing a modified immune cell.

3. The method of claim 2, wherein the polypeptide component of the hypoxic and/or adenosinergic pathway is selected from the group consisting of A2AR, A2BR, HIF1α, and HIF1α.I3.

4. The method of any one of claim 2, wherein the method increases resistance to hypoxic-adenosinergic immunosuppression of the modified immune cell and/or increases cytokine production of the modified immune cell relative to an unmodified reference immune cell.

5. The method of claim 2, wherein the one or more guide polynucleotides target a site selected from those listed in Table 1A and/or contain a spacer listed in Table 1A and/or Table 1B.

6. The method of claim 1, wherein the deaminase domain is an adenosine deaminase domain and guides 158, 170, and 173 are used to edit an HIF1α target site, guides 221 and 224 are used to edit an A2BR target site, or guide 155 is used to edit an A2BR target site.

7. The method of claim 1, wherein the deaminase domain is a cytidine deaminase domain and guides 145 and 155, or guides 222, 223, 225, and 226 are used to are used to edit an A2AR target site.

8. The method claim 2, wherein the method results in a reduction in hypoxia/adenosine-mediated suppression of cytotoxic T cell function.

9. The method of claim 2, wherein the guide polynucleotide directs the base editor to effect a nucleobase alteration that results in a premature stop codon in the gene, or wherein the nucleobase alteration is at a splice acceptor site of the gene.

10. The method of claim 1, wherein the deaminase domain comprises an adenosine deaminase domain and the adenosine deaminase domain comprises one or more of the following mutations: V82S, Y147T, Y147R, Q154S, Y123H, Q154R, and T166R as numbered in the amino acid sequence MSEVEFSHEYWMRHALTLAKRARDEREVPVGAVLVLNNRVIGEGWNRAIGLHDPTAHAEIMA LRQGGLVMQNYRLIDATLYVTFEPCVMCAGAMIHSRIGRVVFGVRNAKTGAAGSLMDVLHYP GMNHRVEITEGILADECAALLCYFFRMPRQVFNAQKKAQSSTD (SEQ ID NO: 1) or a corresponding mutation thereof, or
wherein the adenosine deaminase domain comprises a combination of mutations selected from the group consisting of: Y147T Q154R; Y147T+Q154S; Y147R+Q154S; V82S+Q154S; V82S+Y147R; V82S+Q154R; V82S+Y123H; I76Y+V82S; V82S+Y123H+Y147T; V82S+Y123H+Y147R; V82S+Y123H+Q154R; Y147R+Q154R+Y123H; Y147R+Q154R+I76Y; Y147R+Q154R+T166R; Y123H+Y147R+Q154R+I76Y; V82S+Y123H+Y147R+Q154R; and I76Y+V82S+Y123H+Y147R+Q154R as numbered in SEQ ID NO: 2, or corresponding mutations thereof.

11. The method of claim 1, further comprising altering the cell to:
a) reduce or eliminate expression of one or more polypeptides selected from the group consisting of B2M, CD3ε, PD1, CIITA, CTLA4, LAG3, TIM3, TGFbR1, and TGFbR2;
b) reduce or eliminate expression of each of HLA Class I polypeptides, HLA Class II polypeptides, and A2AR;
c) reduce or eliminate expression of the following polypeptides: CD3F, B2M, and CIITA;
d) reduce or eliminate expression of the following polypeptides: A2AR and HIF1α; and/or
e) reduce or eliminate expression of one or more polypeptides selected from the group consisting of CD3F, CD36, CD37, B2M, CIITA, TRAC, and TRBC.

12. The method of claim 1, further comprising over-expressing Human Leukocyte Antigen-E (HLA-E) or Human Leukocyte Antigen-G (HLA-G) in the cell.

13. A modified immune cell produced according to the method of claim 1.

14. The modified immune cell of claim 13, wherein the cell comprises or further comprises a combination of alterations to polypeptides, wherein the combination of polypeptides is selected from the group consisting of:
a) β2M, TAP1, TAP2, and Tapasin;
b) TRAC, CD52, CIITA, HLA-E, HLA-G, PD-L1, PD1, and CD47;
c) TRAC, CD52, and CIITA;
d) HLA-E, HLA-G, PD-L1, PD1, and CD47;
e) one or more of β2M, TAP1, TAP2, and Tapasin, and one or more of HLA-E, HLA-G, PD-L1, PD1, and CD47;
f) B2M, CD3ε, and CIITA;
g) A2AR, B2M, CD3ε, and CIITA; and
h) A2AR, B2M, CD3ε, CIITA, PD1, and TGFbR2.

15. A base editor system that comprises (i) a base editor, or a nucleic acid sequence encoding the same and (ii) a guide polynucleotide or a nucleic acid sequence encoding the guide polynucleotide, wherein the base editor comprises a programmable DNA binding domain and a deaminase domain, wherein the guide polynucleotide comprises a sequence selected from the group consisting of:
(SEQ ID NO: 387)
UCACCGGAGCGGGAUGCGGA;
(SEQ ID NO: 388)
CUGCUCACCGGAGCGGGAUG;
(SEQ ID NO: 389)
CACUCCCAGGGCUGCGGGGA;
(SEQ ID NO: 390)
CCACUCCCAGGGCUGCGGGG;
(SEQ ID NO: 391)
GCGACGACAGCUGAAGCAGA;
(SEQ ID NO: 392)
UGGAGAGCCAGCCUCUGCCG;
(SEQ ID NO: 393)
GGAGAGCCAGCCUCUGCCGG;
(SEQ ID NO: 394)
ACAUGAGCCAGAGAGGGGCG;
(SEQ ID NO: 395)
GAGGCAGCAAGAACCUUUCA;
(SEQ ID NO: 396)
UGGCCCACACUCCUGGCGGG;
(SEQ ID NO: 397)
CGUUGGCCCACACUCCUGGC;
(SEQ ID NO: 398)
UCUCCCCAGGUACAAUGGCU;
(SEQ ID NO: 399)
CAGUUGUUCCAACCUAGCAU;
(SEQ ID NO: 400)
GGCCAUGCUGCUGGAGACAC;
(SEQ ID NO: 401)
UCACCUGAGCGGGACACAGA;
(SEQ ID NO: 402)
UUACUGUUCCACCCCAGGAA;
(SEQ ID NO: 403)
UUUAAACAGGUAUAAAAGUU;
(SEQ ID NO: 404)
GCUUCAGCGCACUGAGCUGA;
(SEQ ID NO: 405)
UGCCAAGCAGAUGUCAAGAG;
(SEQ ID NO: 406)
CUUACUAUCAUGAUGAGUUU;
(SEQ ID NO: 407)
CAUAUACCUGAGUAGAAAAU;
(SEQ ID NO: 408)
UCAUAUACCUGAGUAGAAAA;
(SEQ ID NO: 409)
UGUUUACAGUUUGAACUAAC;
(SEQ ID NO: 410)
UCAUUAGGCCUUGUGAAAAA;
(SEQ ID NO: 411)
ACACAGGUAUUGCACUGCAC;
(SEQ ID NO: 412)
UAACAGAAUUACCGAAUUGA;
(SEQ ID NO: 413)
AACAGAAUUACCGAAUUGAU;
(SEQ ID NO: 414)
UUUCAGAACUACAGUUCCUG;
(SEQ ID NO: 415)
AGCUCCCAAUGUCGGAGUUU;
(SEQ ID NO: 416)
GAGCUCCCAAUGUCGGAGUU;
(SEQ ID NO: 417)
UUAAAUGAGCUCCCAAUGUC;
(SEQ ID NO: 418)
UUUAAAUGAGCUCCCAAUGU;
and
(SEQ ID NO: 419)
ACCAUACCCAUUUUCUAUUC.

16. The base editor system of claim 15, wherein the deaminase domain is an adenosine deaminase domain comprising one or more of the following mutations: V28S, Y147T, Y147R, Q154S, Y123H, Q154R, and T166R mutation as numbered in the amino acid sequence MSEVEFSHEYWMRHALTLAKRARDEREVPVGAVLVLNNRVIGEGWNRAIGLHDPTAHAEIMA LRQGGLVMQNYRLIDATLYVTFEPCVMCAGAMIHSRIGRVVFGVRNAKTGAAGSLMDVLHYP GMNHRVEITEGILADECAALLCYFFRMPRQVFNAQKKAQSSTD (SEQ ID NO: 1) or a corresponding mutation thereof, or
wherein the adenosine deaminase domain comprises a combination of mutations selected from the group consisting of: Y147T Q154R; Y147T+Q154S; Y147R+Q154S; V82S+Q154S; V82S+Y147R; V82S+Q154R; V82S+Y123H; I76Y+V82S; V82S+Y123H+Y147T; V82S+Y123H+Y147R; V82S+Y123H+Q154R; Y147R+Q154R+Y123H; Y147R+Q154R+176Y; Y147R+Q154R+T166R; Y123H+Y147R+Q154R+176Y; V82S+Y123H+Y147R+Q154R; and I76Y+V82S+Y123H+Y147R+Q154R as numbered in SEQ ID NO: 2, or corresponding mutations thereof.

17. A cell comprising the base editor system of claim 15.

18. A pharmaceutical composition comprising an effective amount a modified immune cell produced according to the method of claim 1 and a pharmaceutically acceptable excipient.

19. A composition comprising a guide polynucleotide and a polynucleotide encoding a fusion protein comprising a polynucleotide programmable DNA binding domain and a deaminase domain, wherein the guide polynucleotide comprises a nucleic acid sequence that is complementary to a gene selected from the group consisting of A2AR, A2BR, HIF1α, and HIF1α.I3 genes.

20. The composition of claim 19, wherein the guide polynucleotide targets a site selected from those listed in Table 1A and/or contains a spacer sequence listed in Table 1A or Table 1B.

21. A kit comprising a modified immune cell produced according to the method of claim 1 and written instructions for using the modified immune cell.

22. A method of treating cancer in a subject, the method comprising administering to the subject an effective amount of a modified immune cell produced according to the method of claim 1.

23. A modified immune effector cell, wherein the modified immune effector cell expresses a chimeric antigen receptor targeting an antigen associated with a disease or disorder, and wherein the modified immune effector cell comprises reduced or undetectable expression of the following polypeptides: A2AR, CD3ε, B2M, and CIITA; or A2AR, B2M, CD3ε, CIITA, PD1, and TGFbR2.
